(19) United States
(12) Patent Application Publication
(10) Pub. No.: US 2002/0173635 A1
(43) Pub. Date: Nov. 21, 2002

(54) Secreted expressed sequence tags (sESTs)

(76) Inventors: Kenneth Jacobs, Newton, MA (US); John M. McCoy, Reading, MA (US); Edward R. LaVallie, Tewksbury, MA (US); Lisa A. Racie, Acton, MA (US); David Merberg, Acton, MA (US); Maurice Treacy, Chestnut Hill, MA (US); Vikki Spaulding, Billerica, MA (US); Michael J. Agostino, Andover, MA (US)

Correspondence Address: LAHIVE & COCKFIELD, 28 STATE STREET, BOSTON, MA, 02109, US

(21) Appl. No.: 10/040,739

(22) Filed: Jan. 7, 2002

Related U.S. Application Data
(63) Continuation of application No. 09/036,520, filed on Mar. 6, 1998, now abandoned.
Application No. 09/036,520 is a continuation of application No. 08/837,312, filed on Apr. 10, 1997, now abandoned.

(51) Int. Cl. C07H 21/04; C12P 21/02; C12N 9/00; C12N 5/06

(52) U.S. Cl. 536/23.1; 435/69.1; 435/320.1; 435/325; 435/183

(57) ABSTRACT

Secreted expressed sequence tags (sESTs) isolated from a varie

### FIELD OF THE INVENTION

[0001] The present invention provides novel polynucleotides which are expressed sequence tags (ESTs) for secreted proteins.

### BACKGROUND OF THE INVENTION

[0002] Gargantuan efforts have been employed by various investigational projects to randomly sequence portions of naturally-occurring cDNAs. The rationale behind this approach to identification and sequencing genes is founded in two basic principles: (1) that transcribed cDNAs represent the product of the most important genes, namely those that are actually expressed in vivo, and (2) that efforts to sequence genes and other portions of the genome of target organisms which are not actually expressed wastes substantial effort on areas not likely to yield genetic information of therapeutic importance. Thus, the high-throughput sequencing efforts focus on only those portions of the genome which are expressed. The randomly produced cDNA sequences represent “expressed sequence tags” or “ESTs”, which identify and can be used as probes for the longer, full-length cDNA or genomic sequence from which they were transcribed.

[0003] Although this “shortcut” approach to genomic sequencing presents savings of effort compared to sequencing of the complete genome, it still produced a vast array of ESTs which may not be directly useful as protein therapeutics. To date, the majority of protein-elated drug discovery has focused on the use of secreted proteins to produce a desired therapeutic effect. Since the EST approach theoretically identifies all expressed proteins, it produces an EST library which contains a mixture of secreted proteins (such as hormones, cytokines and receptors) and non-secreted proteins (such as, for example, metabolic enzymes and cellular structural proteins), without identifying which ESTs correspond to proteins falling into either category. As a result, these methods are not optimally tailored to the needs of investigators searching for secreted proteins because they must separate the secreted “wheat” from the non-secreted “chaff”, wasting effort and resources in the process.

[0004] Co-assigned U.S. Pat. No. 5,536,637, which is incorporated herein by reference, provides methods for focusing genomic sequencing efforts on sequences encoding the secreted proteins which are of most interest for identification of protein therapeutics. The '637 patent discloses a “signal sequence trap” which selectively identifies ESTs for secreted proteins, namely “secreted expressed sequence tags” or “sESTs”. It is to these sESTs that the present invention is directed.

### SUMMARY OF THE INVENTION

[0005] The present invention provides for sESTs isolated from a variety of human RNA/cDNA sources.

[0006] In preferred embodiments, the present invention provides an isolated polynucleotide comprising a nucleotide sequence selected from the group consisting of:

[0007] SEQ ID NO:1, SEQ ID NO:2, SEQ ID NO:3, SEQ ID NO:4, SEQ ID NO:5, SEQ ID NO:6, SEQ ID NO:7, SEQ ID NO:8, SEQ ID NO:9, SEQ ID NO:10, SEQ ID NO:11, SEQ ID NO:12, SEQ ID NO:13, SEQ ID NO:14, SEQ ID NO:15, SEQ ID NO:16, SEQ ID NO:17, SEQ ID NO:18, SEQ ID NO:19, SEQ ID NO:20, SEQ ID NO:21, SEQ ID NO:22, SEQ ID NO:23, SEQ ID NO:24, SEQ ID NO:25, SEQ ID NO:26, SEQ ID NO:27, SEQ ID NO:28, SEQ ID NO:29, SEQ ID NO:30, SEQ ID NO:31, SEQ ID NO:32, SEQ ID NO:33, SEQ ID NO:34, SEQ ID NO:35, SEQ ID NO:36, SEQ ID NO:37, SEQ ID NO:38, SEQ ID NO:39, SEQ ID NO:40, SEQ ID NO:41, SEQ ID NO:42, SEQ ID NO:43, SEQ ID NO:44, SEQ ID NO:45, SEQ ID NO:46, SEQ ID NO:47, SEQ ID NO:48, SEQ ID NO:49, SEQ ID NO:50, SEQ ID NO:51, SEQ ID NO:52, SEQ ID NO:53, SEQ ID NO:54, SEQ ID NO:55, SEQ ID NO:56, SEQ ID NO:57, SEQ ID NO:58, SEQ ID NO:59, SEQ ID NO:60, SEQ ID NO:61, SEQ ID NO:62, SEQ ID NO:63, SEQ ID NO:64, SEQ ID NO:65, SEQ ID NO:66, SEQ ID NO:67, SEQ ID NO:68, SEQ ID NO:69, SEQ ID NO:70, SEQ ID NO:71, SEQ ID NO:72, SEQ ID NO:73, SEQ ID NO:74, SEQ ID NO:75, SEQ ID NO:76, SEQ ID NO:77, SEQ ID NO:78, SEQ ID NO:79, SEQ ID NO:80, SEQ ID NO:81, SEQ ID NO:82, SEQ ID NO:83, SEQ ID NO:84, SEQ ID NO:85, SEQ ID NO:86, SEQ ID NO:87, SEQ ID NO:88, SEQ ID NO:89, SEQ ID NO:90, SEQ ID NO:91, SEQ ID NO:92, SEQ ID NO:93, SEQ ID NO:94, SEQ ID NO:95, SEQ ID NO:96, SEQ ID NO:97, SEQ ID NO:98, SEQ ID NO:99, SEQ ID NO:100, SEQ ID NO:101, SEQ ID NO:102, SEQ ID NO:103, SEQ ID NO:104, SEQ ID NO:105, SEQ ID NO:106, SEQ ID NO:107, SEQ ID NO:108, SEQ ID NO:109, SEQ ID NO:110, SEQ ID NO:111, SEQ ID NO:112, SEQ ID NO:113, SEQ ID NO:114, SEQ ID NO:115, SEQ ID NO:116, SEQ ID NO:117, SEQ ID NO:118, SEQ ID NO:119, SEQ ID NO:120, SEQ ID NO:121, SEQ ID NO:12, SEQ ID NO:123, SEQ ID NO:124, SEQ ID NO:125, SEQ ID NO:126, SEQ ID NO:127, SEQ ID NO:128, SEQ ID NO:129, SEQ ID NO:130, SEQ ID NO:131, SEQ ID NO:132, SEQ ID NO:133, SEQ ID NO:134, SEQ ID NO:135, SEQ ID NO:136, SEQ ID NO:137, SEQ ID NO:138, SEQ ID NO:139, SEQ ID NO:140, SEQ ID NO:141, SEQ ID NO:142, SEQ ID NO:143, SEQ ID NO:144, SEQ ID NO:145, SEQ ID NO:146, SEQ ID NO:147, SEQ ID NO:148, SEQ ID NO:149, SEQ ID NO:150, SEQ ID NO:151, SEQ ID NO:152, SEQ ID NO:153, SEQ ID NO:154, SEQ ID NO:155, SEQ ID NO:156, SEQ ID NO:157, SEQ ID NO:158, SEQ ID NO:159, SEQ ID NO:160, SEQ ID NO:161, SEQ ID NO:162, SEQ ID NO:163, SEQ ID NO:164, SEQ ID NO:165, SEQ ID NO:166, SEQ ID NO:167, SEQ ID NO:168, SEQ ID NO:169, SEQ ID NO:170, SEQ ID NO:171, SEQ ID NO:172, SEQ ID NO:173, SEQ ID NO:174, SEQ ID NO:175, SEQ ID NO:176, SEQ ID NO:177, SEQ ID NO:178, SEQ ID NO:179, SEQ ID NO:180, SEQ ID NO:181, SEQ ID NO:182, SEQ ID NO:183, SEQ ID NO:184, SEQ ID NO:185, SEQ ID NO:186, SEQ ID NO:187, SEQ ID NO:188, SEQ ID NO:189, SEQ ID NO:190, SEQ ID NO:191, SEQ ID NO:192, SEQ ID NO:193, SEQ ID NO:194, SEQ ID NO:195, SEQ ID NO:196, SEQ ID NO:197, SEQ ID NO:198, SEQ ID NO:199, SEQ ID NO:200, SEQ ID NO:201, SEQ ID NO:202, SEQ ID NO:203, SEQ ID NO:204, SEQ ID NO:205, SEQ ID NO:206, SEQ ID NO:207, SEQ ID NO:208, SEQ ID NO:209, SEQ ID NO:210, SEQ ID NO:211, SEQ ID NO:212, SEQ ID NO:213, SEQ ID NO:214, SEQ ID NO:215, SEQ ID NO:216, SEQ ID NO:217, SEQ ID NO:218, SEQ ID NO:219, SEQ ID NO:220, SEQ ID NO:221, SEQ ID NO:222, SEQ ID NO:223, SEQ ID NO:224, SEQ ID NO:225, SEQ ID NO:226, SEQ ID NO:227, SEQ ID NO:228, SEQ ID NO:229, SEQ ID NO:230, SEQ ID NO:231, SEQ ID NO:232, SEQ ID NO:233, SEQ ID NO:234, SEQ ID NO:235, SEQ ID NO:236, SEQ ID NO:237, SEQ ID NO:238, SEQ ID NO:239, SEQ ID NO:240, SEQ ID NO:241, SEQ ID NO:242, SEQ ID NO:243, SEQ ID NO:244, SEQ ID NO:245, SEQ ID NO:246, SEQ ID NO:247, SEQ ID NO:248, SEQ ID NO:249, SEQ ID NO:250, SEQ ID NO:251, SEQ ID NO:252, SEQ ID NO:253, SEQ ID NO:254, SEQ ID NO:255, SEQ ID NO:256, SEQ ID NO:257, SEQ ID NO:258, SEQ ID NO:259, SEQ ID NO:260, SEQ ID NO:261, SEQ ID NO:262, SEQ ID NO:263, SEQ ID NO:264, SEQ ID NO:265, SEQ ID NO:266, SEQ ID NO:267, SEQ ID NO:268, SEQ ID NO:269, SEQ ID NO:270, SEQ ID NO:271, SEQ ID NO:272, SEQ ID NO:273, SEQ ID NO:274, SEQ ID NO:275, SEQ ID NO:276, SEQ ID NO:277, SEQ ID NO:278, SEQ ID NO:279, SEQ ID NO:280, SEQ ID NO:281, SEQ ID NO:282, SEQ ID NO:283, SEQ ID NO:284, SEQ ID NO:285, SEQ ID NO:286, SEQ ID NO:287, SEQ ID NO:288, SEQ ID NO:289, SEQ ID NO:290, SEQ ID NO:291, SEQ ID NO:292, SEQ ID NO:293, SEQ ID NO:294, SEQ ID NO:295, SEQ ID NO:296, SEQ ID NO:297, SEQ ID NO:298, SEQ ID NO:299, SEQ ID NO:300, SEQ ID NO:301, SEQ ID NO:302, SEQ ID NO:303, SEQ ID NO:304, SEQ ID NO:305, SEQ ID NO:306, SEQ ID NO:307, SEQ ID NO:308, SEQ ID NO:309, SEQ ID NO:310, SEQ ID NO:311, SEQ ID NO:312, SEQ ID NO:313, SEQ ID NO:314, SEQ ID NO:315, SEQ ID NO:316, SEQ ID NO:317, SEQ ID NO:318, SEQ ID NO:319, SEQ ID NO:320, SEQ ID NO:321, SEQ ID NO:322, SEQ ID NO:323, SEQ ID NO:324, SEQ ID NO:325, SEQ ID NO:326, SEQ ID NO:327, SEQ ID NO:328, SEQ ID NO:329, SEQ ID NO:330, SEQ ID NO:331, SEQ ID NO:332, SEQ ID NO:333, SEQ ID NO:334, SEQ ID NO:335, SEQ ID NO:336, SEQ ID NO:337, SEQ ID NO:338, SEQ ID NO:339, SEQ ID NO:340, SEQ ID NO:341, SEQ ID NO:342, SEQ ID NO:343, SEQ ID NO:344, SEQ ID NO:345, SEQ ID NO:346, SEQ ID NO:347, SEQ ID NO:348, SEQ ID NO:349, SEQ ID NO:350, SEQ ID NO:351, SEQ ID NO:352, SEQ ID NO:353, SEQ ID NO:354, SEQ ID NO:355, SEQ ID NO:356, SEQ ID NO:357, SEQ ID NO:358, SEQ ID NO:359, SEQ ID NO:360, SEQ ID NO:361, SEQ ID NO:362, SEQ ID NO:363, SEQ ID NO:364, SEQ ID NO:365, SEQ ID NO:366, SEQ ID NO:367, SEQ ID NO:368, SEQ ID NO:369, SEQ ID NO:370, SEQ ID NO:371, SEQ ID NO:372, SEQ ID NO:373, SEQ ID NO:374, SEQ ID NO:375, SEQ ID NO:376, SEQ ID NO:377, SEQ ID NO:378, SEQ ID NO:379, SEQ ID NO:380, SEQ ID NO:381, SEQ ID NO:382, SEQ ID NO:383, SEQ ID NO:384, SEQ ID NO:385, SEQ ID NO:386, SEQ ID NO:387, SEQ ID NO:388, SEQ ID NO:389, SEQ ID NO:390, SEQ ID NO:391, SEQ ID NO:392, SEQ ID NO:393, SEQ ID NO:394, SEQ ID NO:395, SEQ ID NO:396, SEQ ID NO:397, SEQ ID NO:398, SEQ ID NO:399, SEQ ID NO:400, SEQ ID NO:401, SEQ ID NO:402, SEQ ID NO:403, SEQ ID NO:404, SEQ ID NO:405, SEQ ID NO:406, SEQ ID NO:407, SEQ ID NO:408, SEQ ID NO:409, SEQ ID NO:410, SEQ ID NO:411, SEQ ID NO:412, SEQ ID NO:413, SEQ ID NO:414, SEQ ID NO:415, SEQ ID NO:416, SEQ ID NO:417, SEQ ID NO:418, SEQ ID NO:419, SEQ ID NO:420, SEQ ID NO:421, SEQ ID NO:422, SEQ ID NO:423, SEQ ID NO:424, SEQ ID NO:425, SEQ ID NO:426, SEQ ID NO:427, SEQ ID NO:428, SEQ ID NO:429, SEQ ID NO:430, SEQ ID NO:431, SEQ ID NO:432, SEQ ID NO:433, SEQ ID NO:434, SEQ ID NO:435, SEQ ID NO:436, SEQ ID NO:437, SEQ ID NO:438, SEQ ID NO:439, SEQ ID NO:440, SEQ ID NO:441, SEQ ID NO:442, SEQ ID NO:443, SEQ ID NO:444, SEQ ID NO:445, SEQ ID NO:446, SEQ ID NO:447, SEQ ID NO:448, SEQ ID NO:449, SEQ ID NO 450, SEQ ID NO:451, SEQ ID NO:452, SEQ ID NO:453, SEQ ID NO:454, SEQ ID NO:455, SEQ ID NO:456, SEQ ID NO:457, SEQ ID NO:458, SEQ ID NO:459, SEQ ID NO:460, SEQ ID NO:461, SEQ ID NO:462, SEQ ID NO:463, SEQ ID NO:464, SEQ ID NO:465, SEQ ID NO:466, SEQ ID NO:467, SEQ ID NO:468, SEQ ID NO:469, SEQ ID NO:470, SEQ ID NO:471, SEQ ID NO:472, SEQ ID NO:473, SEQ ID NO:474, SEQ ID NO:475, SEQ ID NO:476, SEQ ID NO:477, SEQ ID NO:478, SEQ ID NO:479, SEQ ID NO:480, SEQ ID NO:481, SEQ ID NO:482, SEQ ID NO:483, SEQ ID NO:484, SEQ ID NO:485, SEQ ID NO:486, SEQ ID NO:487, SEQ ID NO:488, SEQ ID NO:489, SEQ ID NO:490, SEQ ID NO:491, SEQ ID NO:492, SEQ ID NO:493, SEQ ID NO:494, SEQ ID NO:495, SEQ ID NO:496, SEQ ID NO:497, SEQ ID NO:498, SEQ ID NO:499, SEQ ID NO:500, SEQ ID NO:501, SEQ ID NO:502, SEQ ID NO:503, SEQ ID NO:504, SEQ ID NO:505, SEQ ID NO:506, SEQ ID NO:507, SEQ ID NO:508, SEQ ID NO:509, SEQ ID NO:510, SEQ ID NO:511, SEQ ID NO:512, SEQ ID NO:513, SEQ ID NO:514, SEQ ID NO:515, SEQ ID NO:516, SEQ ID NO:517, SEQ ID NO:518, SEQ ID NO:519, SEQ ID NO:520, SEQ ID NO:521, SEQ ID NO:522, SEQ ID NO:523, SEQ ID NO:524, SEQ ID NO:525, SEQ ID NO:526, SEQ ID NO:527, SEQ ID NO:528, SEQ ID NO:529, SEQ ID NO:530, SEQ ID NO:531, SEQ ID NO:532, SEQ ID NO:533, SEQ ID NO:534, SEQ ID NO:535, SEQ ID NO:536, SEQ ID NO:537, SEQ ID NO:538, SEQ ID NO:539, SEQ ID NO:540, SEQ ID NO:541, SEQ ID NO:542, SEQ ID NO:543, SEQ ID NO:544, SEQ ID NO:545, SEQ ID NO:546, SEQ ID NO:547, SEQ ID NO:548, SEQ ID NO:549, SEQ ID NO:550, SEQ ID NO:551, SEQ ID NO:552, SEQ ID NO:553, SEQ ID NO:554, SEQ ID NO:555, SEQ ID NO:556, SEQ ID NO:557, SEQ ID NO:558, SEQ ID NO:559, SEQ ID NO:560, SEQ ID NO:561, SEQ ID NO:562, SEQ ID NO:563, SEQ ID NO:564, SEQ ID NO:565, SEQ ID NO:566, SEQ ID NO:567, SEQ ID NO:568, SEQ ID NO:569, SEQ ID NO:570, SEQ ID NO:571, SEQ ID NO:572, SEQ ID NO:573, SEQ ID NO:574, SEQ ID NO:575, SEQ ID NO:576, SEQ ID NO:577, SEQ ID NO:578, SEQ ID NO:579, SEQ ID NO:580, SEQ ID NO:581, SEQ ID NO:582, SEQ ID NO:583, SEQ ID NO:584, SEQ ID NO:585, SEQ ID NO:586, SEQ ID NO:587, SEQ ID NO:588, SEQ ID NO:589, SEQ ID NO:590, SEQ ID NO:591, SEQ ID NO:592, SEQ ID NO:593, SEQ ID NO:594, SEQ ID NO:595, SEQ ID NO:596, SEQ ID NO:597, SEQ ID NO:598, SEQ ID NO:599, SEQ ID NO:600, SEQ ID NO:601, SEQ ID NO:602, SEQ ID NO:603, SEQ ID NO:604, SEQ ID NO:605, SEQ ID NO:606, SEQ ID NO:607, SEQ ID NO:608, SEQ ID NO:609, SEQ ID NO:610, SEQ ID NO:611, SEQ ID NO:612, SEQ ID NO:613, SEQ ID NO:614, SEQ ID NO:615, SEQ ID NO:616, SEQ ID NO:617, SEQ ID NO:618, SEQ ID NO:619, SEQ ID NO:620, SEQ ID NO:621, SEQ ID NO:622, SEQ ID NO:623, SEQ ID NO:624, SEQ ID NO:625, SEQ ID NO:626, SEQ ID NO:627, SEQ ID NO:628, SEQ ID NO:629, SEQ ID NO:630, SEQ ID NO:631, SEQ ID NO:632, SEQ ID NO:633, SEQ ID NO:634, SEQ ID NO:635, SEQ ID NO:636, SEQ ID NO:637, SEQ ID NO:638, SEQ ID NO:639, SEQ ID NO:640, SEQ ID NO:641, SEQ ID NO:642, SEQ ID NO:643, SEQ ID NO:644, SEQ ID NO:645, SEQ ID NO:646, SEQ ID NO:647, SEQ ID NO:648, SEQ ID NO:649, SEQ ID NO:650, SEQ ID NO:651, SEQ ID NO:652, SEQ ID NO:653, SEQ ID NO:654, SEQ ID NO:655, SEQ ID NO:656, SEQ ID NO:657, SEQ ID NO:658, SEQ ID NO:659, SEQ ID NO:660, SEQ ID NO:661, SEQ ID NO:662, SEQ ID NO:663, SEQ ID NO:664, SEQ ID NO:665, SEQ ID NO:666, SEQ ID NO:667, SEQ ID NO:668, SEQ ID NO:669, SEQ ID NO:670, SEQ ID NO:671, SEQ ID NO:672, SEQ ID NO:673, SEQ ID NO:674, SEQ ID NO:675, SEQ ID NO:676, SEQ ID NO:677, SEQ ID NO:678, SEQ ID NO:679, SEQ ID NO:680, SEQ ID NO:681, SEQ ID NO:682, SEQ ID NO:683, SEQ ID NO:684, SEQ ID NO:685, SEQ ID NO:686, SEQ ID NO:687, SEQ ID NO:688, SEQ ID NO:689, SEQ ID NO:690, SEQ ID NO:691, SEQ ID NO:692, SEQ ID NO:693, SEQ ID NO:694, SEQ ID NO:695, SEQ ID NO:696, SEQ ID NO:697, SEQ ID NO:698, SEQ ID NO:699, SEQ ID NO:700, SEQ ID NO:701, SEQ ID NO:702, SEQ ID NO:703, SEQ ID NO:704, SEQ ID NO:705, SEQ ID NO:706, SEQ ID NO:707, SEQ ID NO:708, SEQ ID NO:709, SEQ ID NO:710, SEQ ID NO:711, SEQ ID NO:712, SEQ ID NO:713, SEQ ID NO:714, SEQ ID NO:715, SEQ ID NO:716, SEQ ID NO:717, SEQ ID NO:718, SEQ ID NO:719, SEQ ID NO:720, SEQ ID NO:721, SEQ ID NO:722, SEQ ID NO:723, SEQ ID NO:724, SEQ ID NO:725, SEQ ID NO:726, SEQ ID NO:727, SEQ ID NO:728, SEQ ID NO:729, SEQ ID NO:730, SEQ ID NO:731, SEQ ID NO:732, SEQ ID NO:733, SEQ ID NO:734, SEQ ID NO:735, SEQ ID NO:736, SEQ ID NO:737, SEQ ID NO:738, SEQ ID NO:739, SEQ ID NO:740, SEQ ID NO:741, SEQ ID NO:742, SEQ ID NO:743, SEQ ID NO:744, SEQ ID NO:745, SEQ ID NO:746, SEQ ID NO:747, SEQ ID NO:748, SEQ ID NO:749, SEQ ID NO:750, SEQ ID NO:751, SEQ ID NO:752, SEQ ID NO:753, SEQ ID NO:754, SEQ ID NO:755, SEQ ID NO:756, SEQ ID NO:757, SEQ ID NO:758, SEQ ID NO:759, SEQ ID NO:760, SEQ ID NO:761, SEQ ID NO:762, SEQ ID NO:763, SEQ ID NO:764, SEQ ID NO:765, SEQ ID NO:766, SEQ ID NO:767, SEQ ID NO:768, SEQ ID NO:769, SEQ ID NO:770, SEQ ID NO:771, SEQ ID NO:772, SEQ ID NO:773, SEQ ID NO:774, SEQ ID NO:775, SEQ ID NO:776, SEQ ID NO:777, SEQ ID NO:778, SEQ ID NO:779, SEQ ID NO:780, SEQ ID NO:781, SEQ ID NO:782, SEQ ID NO:783, SEQ ID NO:784, SEQ ID NO:785, SEQ ID NO:786, SEQ ID NO:787, SEQ ID NO:788, SEQ ID NO:789, SEQ ID NO:790, SEQ ID NO:791, SEQ ID NO:792, SEQ ID NO:793, SEQ ID NO:794, SEQ ID NO:795, SEQ ID NO:796, SEQ ID NO:797, SEQ ID NO:798, SEQ ID NO:799, SEQ ID NO:800, SEQ ID NO:801, SEQ ID NO:802, SEQ ID NO:803, SEQ ID NO:804, SEQ ID NO:805, SEQ ID NO:806, SEQ ID NO:807, SEQ ID NO:808, SEQ ID NO:809, SEQ ID NO:810, SEQ ID NO:811, SEQ ID NO:812, SEQ ID NO:813, SEQ ID NO:814, SEQ ID NO:815, SEQ ID NO:816, SEQ ID NO:817, SEQ ID NO:818, SEQ ID NO:819, SEQ ID NO:820, SEQ ID NO:821, SEQ ID NO:822, SEQ ID NO:823, SEQ ID NO:824, SEQ ID NO:825, SEQ ID NO:826, SEQ ID NO:827, SEQ ID NO:828, SEQ ID NO:829, SEQ ID NO:830, SEQ ID NO:831, SEQ ID NO:832, SEQ ID NO:833, SEQ ID NO:834, SEQ ID NO:835, SEQ ID NO:836, SEQ ID NO:837, SEQ ID NO:838, SEQ ID NO:839, SEQ ID NO:840, SEQ ID NO:841, SEQ ID NO:842, SEQ ID NO:843, SEQ ID NO:844, SEQ ID NO:845, SEQ ID NO:846, SEQ ID NO:847, SEQ ID NO:848, SEQ ID NO:849, SEQ ID NO:850, SEQ ID NO:851, SEQ ID NO:852, SEQ ID NO:853, SEQ ID NO:854, SEQ ID NO:855, SEQ ID NO:856, SEQ ID NO:857, SEQ ID NO:858, SEQ ID NO:859, SEQ ID NO:860, SEQ ID NO:861, SEQ ID NO:862, SEQ ID NO:863, SEQ ID NO:864, SEQ ID NO:865, SEQ ID NO:866, SEQ ID NO:867, SEQ ID NO:868, SEQ ID NO:869, SEQ ID NO:870, SEQ ID NO:871, SEQ ID NO:872, SEQ ID NO:873, SEQ ID NO:874, SEQ ID NO:875, SEQ ID NO:876, SEQ ID NO:877, SEQ ID NO:878, SEQ ID NO:879, SEQ ID NO:880, SEQ ID NO:881, SEQ ID NO:882, SEQ ID NO:883, SEQ ID NO:884, SEQ ID NO:885, SEQ ID NO:886, SEQ ID NO:887, SEQ ID NO:888, SEQ ID NO:889, SEQ ID NO:890, SEQ ID NO:891, SEQ ID NO:892, SEQ ID NO:893, SEQ ID NO:894, SEQ ID NO:895, SEQ ID NO:896, SEQ ID NO:897, SEQ ID NO:898, SEQ ID NO:899, SEQ ID NO:900, SEQ ID NO:901, SEQ ID NO:902, SEQ ID NO:903, SEQ ID NO:904, SEQ ID NO:905, SEQ ID NO:906, SEQ ID NO:907, SEQ ID NO:908, SEQ ID NO:909, SEQ ID NO:910, SEQ ID NO:911, SEQ ID NO:912, SEQ ID NO:913, SEQ ID NO:914, SEQ ID NO:915, SEQ ID NO:916, SEQ ID NO:917, SEQ ID NO:918, SEQ ID NO:919, SEQ ID NO:920, SEQ ID NO:921, SEQ ID NO:922, SEQ ID NO:923, SEQ ID NO:924, SEQ ID NO:925, SEQ ID NO:926, SEQ ID NO:927, SEQ ID NO:928, SEQ ID NO:929, SEQ ID NO:930, SEQ ID NO:931, SEQ ID NO:932, SEQ ID NO:933, SEQ ID NO:934, SEQ ID NO:935, SEQ ID NO:936, SEQ ID NO:937, SEQ ID NO:938, SEQ ID NO:939, SEQ ID NO:940, SEQ ID NO:941, SEQ ID NO:942, SEQ ID NO:943, SEQ ID NO:944, SEQ ID NO:945, SEQ ID NO:946, SEQ ID NO:947, SEQ ID NO:948, SEQ ID NO:949, SEQ ID NO:950, SEQ ID NO:951, SEQ ID NO:952, SEQ ID NO:953, SEQ ID NO:954, SEQ ID NO:955, SEQ ID NO:956, SEQ ID NO:957, SEQ ID NO:958, SEQ ID NO:959, SEQ ID NO:960, SEQ ID NO:961, SEQ ID NO:962, SEQ ID NO:963, SEQ ID NO:964, SEQ ID NO:965, SEQ ID NO:966, SEQ ID NO:967, SEQ ID NO:968, SEQ ID NO:969, SEQ ID NO:970, SEQ ID NO:971, SEQ ID NO:972, SEQ ID NO:973, SEQ ID NO:974, SEQ ID NO:975, SEQ ID NO:976, SEQ ID NO:977, SEQ ID NO:978, SEQ ID NO:979, SEQ ID NO:980, SEQ ID NO:981, SEQ ID NO:982, SEQ ID NO:983, SEQ ID NO:984, SEQ ID NO:985, SEQ ID NO:986, SEQ ID NO:987, SEQ ID NO:988, SEQ ID NO:989, SEQ ID NO:990, SEQ ID NO:991, SEQ ID NO:992, SEQ ID NO:993, SEQ ID NO:994, SEQ ID NO:995, SEQ ID NO:996, SEQ ID NO:997, SEQ ID NO:998, SEQ ID NO:999, SEQ ID NO:1000, SEQ ID NO:1001, SEQ ID NO:1002, SEQ ID NO:1003, SEQ ID NO:1004, SEQ ID NO:1005, SEQ ID NO:1006, SEQ ID NO:1007, SEQ ID NO:1008, SEQ ID NO:1009, SEQ ID NO:1010, SEQ ID NO:1011, SEQ ID NO:1012, SEQ ID NO:1013, SEQ ID NO:1014, SEQ ID NO:1015, SEQ ID NO:1016, SEQ ID NO:1017, SEQ ID NO:1018, SEQ ID NO:1019, SEQ ID NO:1020, SEQ ID NO:1021, SEQ ID NO:1022, SEQ ID NO:1023, SEQ ID NO:1024, SEQ ID NO:1025, SEQ ID NO:1026, SEQ ID NO:1027, SEQ ID NO:1028, SEQ ID NO:1029, SEQ ID NO:1030, SEQ ID NO:1031, SEQ ID NO:1032, SEQ ID NO:1033, SEQ ID NO:1034, SEQ ID NO:1035, SEQ ID NO:1036, SEQ ID NO:1037, SEQ ID NO:1038, SEQ ID NO:1039, SEQ ID NO:1040, SEQ ID NO:1041, SEQ ID NO:1042, SEQ ID NO:1043, SEQ ID NO:1044, SEQ ID NO:1045, SEQ ID NO:1046, SEQ ID NO:1047, SEQ ID NO:1048, SEQ ID NO:1049, SEQ ID NO:1050, SEQ ID NO:1051, SEQ ID NO:1052, SEQ ID NO:1053, SEQ ID NO:1054, SEQ ID NO:1055, SEQ ID NO:1056, SEQ ID NO:1057, SEQ ID NO:1058, SEQ ID NO:1059, SEQ ID NO:1060, SEQ ID NO:1061, SEQ ID NO:1062, SEQ ID NO:1063, SEQ ID NO:1064, SEQ ID NO:1065, SEQ ID NO:1066, SEQ ID NO:1067, SEQ ID NO:1068, SEQ ID NO:1069, SEQ ID NO:1070, SEQ ID NO:1071, SEQ ID NO:1072, SEQ ID NO:1073, SEQ ID NO:1074, SEQ ID NO:1075, SEQ ID NO:1076, SEQ ID NO:1077, SEQ ID NO:1078, SEQ ID NO:1079, SEQ ID NO:1080, SEQ ID NO:1081, SEQ ID NO:1082, SEQ ID NO:1083, SEQ ID NO:1084, SEQ ID NO:1085, SEQ ID NO:1086, SEQ ID NO:1087, SEQ ID NO:1088, SEQ ID NO:1089, SEQ ID NO:1090, SEQ ID NO:1091, SEQ ID NO:1092, SEQ ID NO:1093, SEQ ID NO:1094, SEQ ID NO:1095, SEQ ID NO:1096, SEQ ID NO:1097, SEQ ID NO:1098, SEQ ID NO:1099, SEQ ID NO:1100, SEQ ID NO:1101, SEQ ID NO:1102, SEQ ID NO:1103, SEQ ID NO:1104, SEQ ID NO:1105, SEQ ID NO:1106, SEQ ID NO:1107, SEQ ID NO:1108, SEQ ID NO:1109, SEQ ID NO:1110, SEQ ID NO:1111, SEQ ID NO:1112, SEQ ID NO:1113, SEQ ID NO:1114, SEQ ID NO:1115, SEQ ID NO:1116, SEQ ID NO:1117, SEQ ID NO:1018, SEQ ID NO:1019, SEQ ID NO:1120, SEQ ID NO:1121, SEQ ID NO:1122, SEQ ID NO:1123, SEQ ID NO:1124, SEQ ID NO:1125, SEQ ID NO:1126, SEQ ID NO:1127, SEQ ID NO:1128, SEQ ID NO:1129, SEQ ID NO:1130, SEQ ID NO:1131, SEQ ID NO:1132, SEQ ID NO:1133, SEQ ID NO:1134, SEQ ID NO:1135, SEQ ID NO:1136, SEQ ID NO:1137, SEQ ID NO:1138, SEQ ID NO:1139, SEQ ID NO:1140, SEQ ID NO:1141, SEQ ID NO:1142, SEQ ID NO:1143, SEQ ID NO:1144, SEQ ID NO:1145, SEQ ID NO:1146, SEQ ID NO:1147, SEQ ID NO:1148, SEQ ID NO:1149, SEQ ID NO:1150, SEQ ID NO:1151, SEQ ID NO:1152, SEQ ID NO:1153, SEQ ID NO:1154, SEQ ID NO:1155, SEQ ID NO:1156, SEQ ID NO:1157, SEQ ID NO:1158, SEQ ID NO:1159, SEQ ID NO:1160, SEQ ID NO:1161, SEQ ID NO:1162, SEQ ID NO:1163, SEQ ID NO:1164, SEQ ID NO:1165, SEQ ID NO:1166, SEQ ID NO:1167, SEQ ID NO:1168, SEQ ID NO:1169, SEQ ID NO:1170, SEQ ID NO:1171, SEQ ID NO:1172, SEQ ID NO:1173, SEQ ID NO:1174, SEQ ID NO:1175, SEQ ID NO:1176, SEQ ID NO:1177, SEQ ID NO:1178, SEQ ID NO:1179, SEQ ID NO:1180, SEQ ID NO:1181, SEQ ID NO:1182, SEQ ID NO:1183, SEQ ID NO:1184, SEQ ID NO:1185, SEQ ID NO:1186, SEQ ID NO:1187, SEQ ID NO:1188, SEQ ID NO:1189, SEQ ID NO:1190, SEQ ID NO:1191, SEQ ID NO:1192, SEQ ID NO:1193, SEQ ID NO:1194, SEQ ID NO:1195, SEQ ID NO:1196, SEQ ID NO:1197, SEQ ID NO:1198, SEQ ID NO:1199, SEQ ID NO:1200, SEQ ID NO:1201, SEQ ID NO:1202, SEQ ID NO:1203, SEQ ID NO:1204, SEQ ID NO:1205, SEQ ID NO:1206, SEQ ID NO:1207, SEQ ID NO:1208, SEQ ID NO:1209, SEQ ID NO:1210, SEQ ID NO:1211, SEQ ID NO:1212, SEQ ID NO:1213, SEQ ID NO:1214, SEQ ID NO:1215, SEQ ID NO:1216, SEQ ID NO:1217, SEQ ID NO:1218, SEQ ID NO:1219, SEQ ID NO:1220, SEQ ID NO:1221, SEQ ID NO:1222, SEQ ID NO:1223, SEQ ID NO:1224, SEQ ID NO:1225, SEQ ID NO:1226, SEQ ID NO:1227, SEQ ID NO:1228, SEQ ID NO:1229, SEQ ID NO:1230, SEQ ID NO:1231, SEQ ID NO:1232, SEQ ID NO:1233, SEQ ID NO:1234, SEQ ID NO:1235, SEQ ID NO:1236, SEQ ID NO:1237, SEQ ID NO:1238, SEQ ID NO:1239, SEQ ID NO:1240, SEQ ID NO:1241, SEQ ID NO:1242, SEQ ID NO:1243, SEQ ID NO:1244, SEQ ID NO:1245, SEQ ID NO:1246, SEQ ID NO:1247, SEQ ID NO:1248, SEQ ID NO:1249, SEQ ID NO:1250, SEQ ID NO:1251, SEQ ID NO:1252, SEQ ID NO:1253, SEQ ID NO:1254, SEQ ID NO:1255, SEQ ID NO:1256, SEQ ID NO:1257, SEQ ID NO:1258, SEQ ID NO:1259, SEQ ID NO:1260, SEQ ID NO:1261, SEQ ID NO:1262, SEQ ID NO:1263, SEQ ID NO:1264, SEQ ID NO:1265, SEQ ID NO:1266, SEQ ID NO:1267, SEQ ID NO:1268, SEQ ID NO:1269, SEQ ID NO:1270, SEQ ID NO:1271, SEQ ID NO:1272, SEQ ID NO:1273, SEQ ID NO:1274, SEQ ID NO:1275, SEQ ID NO:1276, SEQ ID NO:1277, SEQ ID NO:1278, SEQ ID NO:1279, SEQ ID NO:1280, SEQ ID NO:1281, SEQ ID NO:1282, SEQ ID NO:1283, SEQ ID NO:1284, SEQ ID NO:1285, SEQ ID NO:1286, SEQ ID NO:1287, SEQ ID NO:1288, SEQ ID NO:1289, SEQ ID NO:1290, SEQ ID NO:1291, SEQ ID NO:1292, SEQ ID NO:1293, SEQ ID NO:1294, SEQ ID NO:1295, SEQ ID NO:1296, SEQ ID NO:1297, SEQ ID NO:1298, SEQ ID NO:1299, SEQ ID NO:1300, SEQ ID NO:1301, SEQ ID NO:1302, SEQ ID NO:1303, SEQ ID NO:1304, SEQ ID NO:1305, SEQ ID NO:1306, SEQ ID NO:1307, SEQ ID NO:1308, SEQ ID NO:1309, SEQ ID NO:1310, SEQ ID NO:1311, SEQ ID NO:1312, SEQ ID NO:1313, SEQ ID NO:1314, SEQ ID NO:1315, SEQ ID NO:1316, SEQ ID NO:1317, SEQ ID NO:1318, SEQ ID NO:1319, SEQ ID NO:1320, SEQ ID NO:1321, SEQ ID NO:1322, SEQ ID NO:1323, SEQ ID NO:1324, SEQ ID NO:1325, SEQ ID NO:1326, SEQ ID NO:1327, SEQ ID NO:1328, SEQ ID NO:1329, SEQ ID NO:1330, SEQ ID NO:1331, SEQ ID NO:1332, SEQ ID NO:1333, SEQ ID NO:1334, SEQ ID NO:1335, SEQ ID NO:1336, SEQ ID NO:1337, SEQ ID NO:1338, SEQ ID NO:1339, SEQ ID NO:1340, SEQ ID NO:1341, SEQ ID NO:1342, SEQ ID NO:1343, SEQ ID NO:1344, SEQ ID NO:1345, SEQ ID NO:1346, SEQ ID NO:1347, SEQ ID NO:1348, SEQ ID NO:1349, SEQ ID NO:1350, SEQ ID NO:1351, SEQ ID NO:1352, SEQ ID NO:1353, SEQ ID NO:1354, SEQ ID NO:1355, SEQ ID NO:1356, SEQ ID NO:1357, SEQ ID NO:1358, SEQ ID NO:1359, SEQ ID NO:1360, SEQ ID NO:1361, SEQ ID NO:1362, SEQ ID NO:1363, SEQ ID NO:1364, SEQ ID NO:1365, SEQ ID NO:1366, SEQ ID NO:1367, SEQ ID NO:1368, SEQ ID NO:1369, SEQ ID NO:1370, SEQ ID NO:1371, SEQ ID NO:1372, SEQ ID NO:1373, SEQ ID NO:1374, SEQ ID NO:1375, SEQ ID NO:1376, SEQ ID NO:1377, SEQ ID NO:1378, SEQ ID NO:1379, SEQ ID NO:1380, SEQ ID NO:1381, SEQ ID NO:1382, SEQ ID NO:1383, SEQ ID NO:1384, SEQ ID NO:1385, SEQ ID NO:1386, SEQ ID NO:1387, SEQ ID NO:1388, SEQ ID NO:1389, SEQ ID NO:1390, SEQ ID NO:1391, SEQ ID NO:1392, SEQ ID NO:1393, SEQ ID NO:1394, SEQ ID NO:1395, SEQ ID NO:1396, SEQ ID NO:1397, SEQ ID NO:1398, SEQ ID NO:1399, SEQ ID NO:1400, SEQ ID NO:1401, SEQ ID NO:1402, SEQ ID NO:1403, SEQ ID NO:1404, SEQ ID NO:1405, SEQ ID NO:1406, SEQ ID NO:1407, SEQ ID NO:1408, SEQ ID NO:1409, SEQ ID NO:1410, SEQ ID NO:1411, SEQ ID NO:1412, SEQ ID NO:1413, SEQ ID NO:1414, SEQ ID NO:1415, SEQ ID NO:1416, SEQ ID NO:1417, SEQ ID NO:1418, SEQ ID NO:1419, SEQ ID NO:1420, SEQ ID NO:1421, SEQ ID NO:1422, SEQ ID NO:1423, SEQ ID NO:1424, SEQ ID NO:1425, SEQ ID NO:1426, SEQ ID NO:1427, SEQ ID NO:1428, SEQ ID NO:1429, SEQ ID NO:1430, SEQ ID NO:1431, SEQ ID NO:1432, SEQ ID NO:1433, SEQ ID NO:1434, SEQ ID NO:1435, SEQ ID NO:1436, SEQ ID NO:1437, SEQ ID NO:1438, SEQ ID NO:1439, SEQ ID NO:1440, SEQ ID NO:1441, SEQ ID NO:1442, SEQ ID NO:1443, SEQ ID NO:1444, SEQ ID NO:1445, SEQ ID NO:1446, SEQ ID NO:1447, SEQ ID NO:1448, SEQ ID NO:1449, SEQ ID NO:1450, SEQ ID NO:1451, SEQ ID NO:1452, SEQ ID NO:1453, SEQ ID NO:1454, SEQ ID NO:1455, SEQ ID NO:1456, SEQ ID NO:1457, SEQ ID NO:1458, SEQ ID NO:1459, SEQ ID NO:1460, SEQ ID NO:1461, SEQ ID NO:1462, SEQ ID NO:1463, SEQ ID NO:1464, SEQ ID NO:1465, SEQ ID NO:1466, SEQ ID NO:1467, SEQ ID NO:1468, SEQ ID NO:1469, SEQ ID NO:1470, SEQ ID NO:1471, SEQ ID NO:1472, SEQ ID NO:1473, SEQ ID NO:1474, SEQ ID NO:1475, SEQ ID NO:1476, SEQ ID NO:1477, SEQ ID NO:1478, SEQ ID NO:1479, SEQ ID NO:1480, SEQ ID NO:1481, SEQ ID NO:1482, SEQ ID NO:1483, SEQ ID NO:1484, SEQ ID NO:1485, SEQ ID NO:1486, SEQ ID NO:1487, SEQ ID NO:1488, SEQ ID NO:1489, SEQ ID NO:1490, SEQ ID NO:1491, SEQ ID NO:1492, SEQ ID NO:1493, SEQ ID NO:1494, SEQ ID NO:1495, SEQ ID NO:1496, SEQ ID NO:1497, SEQ ID NO:1498, SEQ ID NO:1499, SEQ ID NO:1500, SEQ ID NO:1501, SEQ ID NO:1502, SEQ ID NO:1503, SEQ ID NO:1504, SEQ ID NO:1505, SEQ ID NO:1506, SEQ ID NO:1507, SEQ ID NO:1508, SEQ ID NO:1509, SEQ ID NO:1510, SEQ ID NO:1511, SEQ ID NO:1512, SEQ ID NO:1513, SEQ ID NO:1514, SEQ ID NO:1515, SEQ ID NO:1516, SEQ ID NO:1517, SEQ ID NO:1518, and SEQ ID NO:1519;

[0008] or a complement of said sequence.

[0009] In other embodiments, the present invention provides an isolated polynucleotide consisting of a nucleotide sequence selected from the group consisting of:

[0010] SEQ ID NO:1, SEQ ID NO:2, SEQ ID NO:3, SEQ ID NO:4, SEQ ID NO:5, SEQ ID NO:6, SEQ ID NO:7, SEQ ID NO:8, SEQ ID NO:9, SEQ ID NO:10, SEQ ID NO:11, SEQ ID NO:12, SEQ ID NO:13, SEQ ID NO:14, SEQ ID NO:15, SEQ ID NO:16, SEQ ID NO:17, SEQ ID NO:18, SEQ ID NO:19, SEQ ID NO:20, SEQ ID NO:21, SEQ ID NO:22, SEQ ID NO:23, SEQ ID NO:24, SEQ ID NO:25, SEQ ID NO:26, SEQ ID NO:27, SEQ ID NO:28, SEQ ID NO:29, SEQ ID NO:30, SEQ ID NO:31, SEQ ID NO:32, SEQ ID NO:33, SEQ ID NO:34, SEQ ID NO:35, SEQ ID NO:36, SEQ ID NO:37, SEQ ID NO:38, SEQ ID NO:39, SEQ ID NO:40, SEQ ID NO:41, SEQ ID NO:42, SEQ ID NO:43, SEQ ID NO:44, SEQ ID NO:45, SEQ ID NO:46, SEQ ID NO:47, SEQ ID NO:48, SEQ ID NO:49, SEQ ID NO:50, SEQ ID NO:51, SEQ ID NO:52, SEQ ID NO:53, SEQ ID NO:54, SEQ ID NO:55, SEQ ID NO:56, SEQ ID NO:57, SEQ ID NO:58, SEQ ID NO:59, SEQ ID NO:60, SEQ ID NO:61, SEQ ID NO:62, SEQ ID NO:63, SEQ ID NO:64, SEQ ID NO:65, SEQ ID NO:66, SEQ ID NO:67, SEQ ID NO:68, SEQ ID NO:69, SEQ ID NO:70, SEQ ID NO:71, SEQ ID NO:72, SEQ ID NO:73, SEQ ID NO:74, SEQ ID NO:75, SEQ ID NO:76, SEQ ID NO:77, SEQ ID NO:78, SEQ ID NO:79, SEQ ID NO:80, SEQ ID NO:81, SEQ ID NO:82, SEQ ID NO:83, SEQ ID NO:84, SEQ ID NO:85, SEQ ID NO:86, SEQ ID NO:87, SEQ ID NO:88, SEQ ID NO:89, SEQ ID NO:90, SEQ ID NO:91, SEQ ID NO:92, SEQ ID NO:93, SEQ ID NO:94, SEQ ID NO:95, SEQ ID NO:96, SEQ ID NO:97, SEQ ID NO:98, SEQ ID NO:99, SEQ ID NO:100, SEQ ID NO:101, SEQ ID NO:102, SEQ ID NO:103, SEQ ID NO:104, SEQ ID NO:105, SEQ ID NO:106, SEQ ID NO:107, SEQ ID NO:108, SEQ ID NO:109, SEQ ID NO:110, SEQ ID NO:111, SEQ ID NO:112, SEQ ID NO:113, SEQ ID NO:114, SEQ ID NO:115, SEQ ID NO:116, SEQ ID NO:117, SEQ ID NO:118, SEQ ID NO:119, SEQ ID NO:120, SEQ ID NO:121, SEQ ID NO:122, SEQ ID NO:123, SEQ ID NO:124, SEQ ID NO:125, SEQ ID NO:126, SEQ ID NO:127, SEQ ID NO:128, SEQ ID NO:129, SEQ ID NO:130, SEQ ID NO:131, SEQ ID NO:132, SEQ ID NO:133, SEQ ID NO:134, SEQ ID NO:135, SEQ ID NO:136, SEQ ID NO:137, SEQ ID NO:138, SEQ ID NO:139, SEQ ID NO:140, SEQ ID NO:141, SEQ ID NO:142, SEQ ID NO:143, SEQ ID NO:144, SEQ ID NO:145, SEQ ID NO:146, SEQ ID NO:147, SEQ ID NO:148, SEQ ID NO:149, SEQ ID NO:150, SEQ ID NO:151, SEQ ID NO:152, SEQ ID NO:153, SEQ ID NO:154, SEQ ID NO:155, SEQ ID NO:156, SEQ ID NO:157, SEQ ID NO:158, SEQ ID NO:159, SEQ ID NO:160, SEQ ID NO:161, SEQ ID NO:162, SEQ ID NO:163, SEQ ID NO:164, SEQ ID NO:165, SEQ ID NO:166, SEQ ID NO:167, SEQ ID NO:168, SEQ ID NO:169, SEQ ID NO:170, SEQ ID NO:171, SEQ ID NO:172, SEQ ID NO:173, SEQ ID NO:174, SEQ ID NO:175, SEQ ID NO:176, SEQ ID NO:177, SEQ ID NO:178, SEQ ID NO:179, SEQ ID NO:180, SEQ ID NO:181, SEQ ID NO:182, SEQ ID NO:183, SEQ ID NO:184, SEQ ID NO:185, SEQ ID NO:186, SEQ ID NO:187, SEQ ID NO:188, SEQ ID NO:189, SEQ ID NO:190, SEQ ID NO:191, SEQ ID NO:192, SEQ ID NO:193, SEQ ID NO:194, SEQ ID NO:195, SEQ ID NO:196, SEQ ID NO:197, SEQ ID NO:198, SEQ ID NO:199, SEQ ID NO:200, SEQ ID NO:201, SEQ ID NO:202, SEQ ID NO:203, SEQ ID NO:204, SEQ ID NO:205, SEQ ID NO:206, SEQ ID NO:207, SEQ ID NO:208, SEQ ID NO:209, SEQ ID NO:210, SEQ ID NO:211, SEQ ID NO:212, SEQ ID NO:213, SEQ ID NO:214, SEQ ID NO:215, SEQ ID NO:216, SEQ ID NO:217, SEQ ID NO:218, SEQ ID NO:219, SEQ ID NO:220, SEQ ID NO:221, SEQ ID NO:222, SEQ ID NO:223, SEQ ID NO:224, SEQ ID NO:225, SEQ ID NO:226, SEQ ID NO:227, SEQ ID NO:228, SEQ ID NO:229, SEQ ID NO:230, SEQ ID NO:231, SEQ ID NO:232, SEQ ID NO:233, SEQ ID NO:234, SEQ ID NO:235, SEQ ID NO:236, SEQ ID NO:237, SEQ ID NO:238, SEQ ID NO:239, SEQ ID NO:240, SEQ ID NO:241, SEQ ID NO:242, SEQ ID NO:243, SEQ ID NO:244, SEQ ID NO:245, SEQ ID NO:246, SEQ ID NO:247, SEQ ID NO:248, SEQ ID NO:249, SEQ ID NO:250, SEQ ID NO:251, SEQ ID NO:252, SEQ ID NO:253, SEQ ID NO:254, SEQ ID NO:255, SEQ ID NO:256, SEQ ID NO:257, SEQ ID NO:258, SEQ ID NO:259, SEQ ID NO:260, SEQ ID NO:261, SEQ ID NO:262, SEQ ID NO:263, SEQ ID NO:264, SEQ ID NO:265, SEQ ID NO:266, SEQ ID NO:267, SEQ ID NO:268, SEQ ID NO:269, SEQ ID NO:270, SEQ ID NO:271, SEQ ID NO:272, SEQ ID NO:273, SEQ ID NO:274, SEQ ID NO:275, SEQ ID NO:276, SEQ ID NO:277, SEQ ID NO:278, SEQ ID NO:279, SEQ ID NO:280, SEQ ID NO:281, SEQ ID NO:282, SEQ ID NO:283, SEQ ID NO:284, SEQ ID NO:285, SEQ ID NO:286, SEQ ID NO:287, SEQ ID NO:288, SEQ ID NO:289, SEQ ID NO:290, SEQ ID NO:291, SEQ ID NO:292, SEQ ID NO:293, SEQ ID NO:294, SEQ ID NO:295, SEQ ID NO:296, SEQ ID NO:297, SEQ ID NO:298, SEQ ID NO:299, SEQ ID NO:300, SEQ ID NO:301, SEQ ID NO:302, SEQ ID NO:303, SEQ ID NO:304, SEQ ID NO:305, SEQ ID NO:306, SEQ ID NO:307, SEQ ID NO:308, SEQ ID NO:309, SEQ ID NO:310, SEQ ID NO:311, SEQ ID NO:312, SEQ ID NO:313, SEQ ID NO:314, SEQ ID NO:315, SEQ ID NO:316, SEQ ID NO:317, SEQ ID NO:318, SEQ ID NO:319, SEQ ID NO:320, SEQ ID NO:321, SEQ ID NO:322, SEQ ID NO:323, SEQ ID NO:324, SEQ ID NO:325, SEQ ID NO:326, SEQ ID NO:327, SEQ ID NO:328, SEQ ID NO:329, SEQ ID NO:330, SEQ ID NO:331, SEQ ID NO:332, SEQ ID NO:333, SEQ ID NO:334, SEQ ID NO:335, SEQ ID NO:336, SEQ ID NO:337, SEQ ID NO:338, SEQ ID NO:339, SEQ ID NO:340, SEQ ID NO:341, SEQ ID NO:342, SEQ ID NO:343, SEQ ID NO:344, SEQ ID NO:345, SEQ ID NO:346, SEQ ID NO:347, SEQ ID NO:348, SEQ ID NO:349, SEQ ID NO:350, SEQ ID NO:351, SEQ ID NO:352, SEQ ID NO:353, SEQ ID NO:354, SEQ ID NO:355, SEQ ID NO:356, SEQ ID NO:357, SEQ ID NO:358, SEQ ID NO:359, SEQ ID NO:360, SEQ ID NO:361, SEQ ID NO:362, SEQ ID NO:363, SEQ ID NO:364, SEQ ID NO:365, SEQ ID NO:366, SEQ ID NO:367, SEQ ID NO:368, SEQ ID NO:369, SEQ ID NO:370, SEQ ID NO:371, SEQ ID NO:372, SEQ ID NO:373, SEQ ID NO:374, SEQ ID NO:375, SEQ ID NO:376, SEQ ID NO:377, SEQ ID NO:378, SEQ ID NO:379, SEQ ID NO:380, SEQ ID NO:381, SEQ ID NO:382, SEQ ID NO:383, SEQ ID NO:384, SEQ ID NO:385, SEQ ID NO:386, SEQ ID NO:387, SEQ ID NO:388, SEQ ID NO:389, SEQ ID NO:390, SEQ ID NO:391, SEQ ID NO:392, SEQ ID NO:393, SEQ ID NO:394, SEQ ID NO:395, SEQ ID NO:396, SEQ ID NO:397, SEQ ID NO:398, SEQ ID NO:399, SEQ ID NO:400, SEQ ID NO:401, SEQ ID NO:402, SEQ ID NO:403, SEQ ID NO:404, SEQ ID NO:405, SEQ ID NO:406, SEQ ID NO:407, SEQ ID NO:408, SEQ ID NO:409, SEQ ID NO:410, SEQ ID NO:411, SEQ ID NO:412, SEQ ID NO:413, SEQ ID NO:414, SEQ ID NO:415, SEQ ID NO:416, SEQ ID NO:417, SEQ ID NO:418, SEQ ID NO:419, SEQ ID NO:420, SEQ ID NO:421, SEQ ID NO:422, SEQ ID NO:423, SEQ ID NO:424, SEQ ID NO:425, SEQ ID NO:426, SEQ ID NO:427, SEQ ID NO:428, SEQ ID NO:429, SEQ ID NO:430, SEQ ID NO:431, SEQ ID NO:432, SEQ ID NO:433, SEQ ID NO:434, SEQ ID NO:435, SEQ ID NO:436, SEQ ID NO:437, SEQ ID NO:438, SEQ ID NO:439, SEQ ID NO:440, SEQ ID NO:441, SEQ ID NO:442, SEQ ID NO:443, SEQ ID NO:444, SEQ ID NO:445, SEQ ID NO:446, SEQ ID NO:447, SEQ ID NO:448, SEQ ID NO:449, SEQ ID NO:450, SEQ ID NO:451, SEQ ID NO:452, SEQ ID NO:453, SEQ ID NO:454, SEQ ID NO:455, SEQ ID NO:456, SEQ ID NO:457, SEQ ID NO:458, SEQ ID NO:459, SEQ ID NO:460, SEQ ID NO:461, SEQ ID NO:462, SEQ ID NO:463, SEQ ID NO:464, SEQ ID NO:465, SEQ ID NO:466, SEQ ID NO:467, SEQ ID NO:468, SEQ ID NO:469, SEQ ID NO:470, SEQ ID NO:471, SEQ ID NO:472, SEQ ID NO:473, SEQ ID NO:474, SEQ ID NO:475, SEQ ID NO:476, SEQ ID NO:477, SEQ ID NO:478, SEQ ID NO:479, SEQ ID NO:480, SEQ ID NO:481, SEQ ID NO:482, SEQ ID NO:483, SEQ ID NO:484, SEQ ID NO:485, SEQ ID NO:486, SEQ ID NO:487, SEQ ID NO:488, SEQ ID NO:489, SEQ ID NO:490, SEQ ID NO:491, SEQ ID NO:492, SEQ ID NO:493, SEQ ID NO:494, SEQ ID NO:495, SEQ ID NO:496, SEQ ID NO:497, SEQ ID NO:498, SEQ ID NO:499, SEQ ID NO:500, SEQ ID NO:501, SEQ ID NO:502, SEQ ID NO:503, SEQ ID NO:504, SEQ ID NO:505, SEQ ID NO:506, SEQ ID NO:507, SEQ ID NO:508, SEQ ID NO:509, SEQ ID NO:510, SEQ ID NO:511, SEQ ID NO:512, SEQ ID NO:513, SEQ ID NO:514, SEQ ID NO:515, SEQ ID NO:516, SEQ ID NO:517, SEQ ID NO:518, SEQ ID NO:519, SEQ ID NO:520, SEQ ID NO:521, SEQ ID NO:522, SEQ ID NO:523, SEQ ID NO:524, SEQ ID NO:525, SEQ ID NO:526, SEQ ID NO:527, SEQ ID NO:528, SEQ ID NO:529, SEQ ID NO:530, SEQ ID NO:531, SEQ ID NO:532, SEQ ID NO:533, SEQ ID NO:534, SEQ ID NO:535, SEQ ID NO:536, SEQ ID NO:537, SEQ ID NO:538, SEQ ID NO:539, SEQ ID NO:540, SEQ ID NO:541, SEQ ID NO:542, SEQ ID NO:543, SEQ ID NO:544, SEQ ID NO:545, SEQ ID NO:546, SEQ ID NO:547, SEQ ID NO:548, SEQ ID NO:549, SEQ ID NO:550, SEQ ID NO:551, SEQ ID NO:552, SEQ ID NO:553, SEQ ID NO:554, SEQ ID NO:555, SEQ ID NO:556, SEQ ID NO:557, SEQ ID NO:558, SEQ ID NO:559, SEQ ID NO:560, SEQ ID NO:561, SEQ ID NO:562, SEQ ID NO:563, SEQ ID NO:564, SEQ ID NO:565, SEQ ID NO:566, SEQ ID NO:567, SEQ ID NO:568, SEQ ID NO:569, SEQ ID NO:570, SEQ ID NO:571, SEQ ID NO:572, SEQ ID NO:573, SEQ ID NO:574, SEQ ID NO:575, SEQ ID NO:576, SEQ ID NO:577, SEQ ID NO:578, SEQ ID NO:579, SEQ ID NO:580, SEQ ID NO:581, SEQ ID NO:582, SEQ ID NO:583, SEQ ID NO:584, SEQ ID NO:585, SEQ ID NO:586, SEQ ID NO:587, SEQ ID NO:588, SEQ ID NO:589, SEQ ID NO:590, SEQ ID NO:591, SEQ ID NO:592, SEQ ID NO:593, SEQ ID NO:594, SEQ ID NO:595, SEQ ID NO:596, SEQ ID NO:597, SEQ ID NO:598, SEQ ID NO:599, SEQ ID NO:600, SEQ ID NO:601, SEQ ID NO:602, SEQ ID NO:603, SEQ ID NO:604, SEQ ID NO:605, SEQ ID NO:606, SEQ ID NO:607, SEQ ID NO:608, SEQ ID NO:609, SEQ ID NO:610, SEQ ID NO:611, SEQ ID NO:612, SEQ ID NO:613, SEQ ID NO:614, SEQ ID NO:615, SEQ ID NO:616, SEQ ID NO:617, SEQ ID NO:618, SEQ ID NO:619, SEQ ID NO:620, SEQ ID NO:621, SEQ ID NO:622, SEQ ID NO:623, SEQ ID NO:624, SEQ ID NO:625, SEQ ID NO:626, SEQ ID NO:627, SEQ ID NO:628, SEQ ID NO:629, SEQ ID NO:630, SEQ ID NO:631, SEQ ID NO:632, SEQ ID NO:633, SEQ ID NO:634, SEQ ID NO:635, SEQ ID NO:636, SEQ ID NO:637, SEQ ID NO:638, SEQ ID NO:639, SEQ ID NO:640, SEQ ID NO:641, SEQ ID NO:642, SEQ ID NO:643, SEQ ID NO:644, SEQ ID NO:645, SEQ ID NO:646, SEQ ID NO:647, SEQ ID NO:648, SEQ ID NO:649, SEQ ID NO:650, SEQ ID NO:651, SEQ ID NO:652, SEQ ID NO:653, SEQ ID NO:654, SEQ ID NO:655, SEQ ID NO:656, SEQ ID NO:657, SEQ ID NO:658, SEQ ID NO:659, SEQ ID NO:660, SEQ ID NO:661, SEQ ID NO:662, SEQ ID NO:663, SEQ ID NO:664, SEQ ID NO:665, SEQ ID NO:666, SEQ ID NO:667, SEQ ID NO:668, SEQ ID NO:669, SEQ ID NO:670, SEQ ID NO:671, SEQ ID NO:672, SEQ ID NO:673, SEQ ID NO:674, SEQ ID NO:675, SEQ ID NO:676, SEQ ID NO:677, SEQ ID NO:678, SEQ ID NO:679, SEQ ID NO:680, SEQ ID NO:681, SEQ ID NO:682, SEQ ID NO:683, SEQ ID NO:684, SEQ ID NO:685, SEQ ID NO:686, SEQ ID NO:687, SEQ ID NO:688, SEQ ID NO:689, SEQ ID NO:690, SEQ ID NO:691, SEQ ID NO:692, SEQ ID NO:693, SEQ ID NO:694, SEQ ID NO:695, SEQ ID NO:696, SEQ ID NO:697, SEQ ID NO:698, SEQ ID NO:699, SEQ ID NO:700, SEQ ID NO:701, SEQ ID NO:702, SEQ ID NO:703, SEQ ID NO:704, SEQ ID NO:705, SEQ ID NO:706, SEQ ID NO:707, SEQ ID NO:708, SEQ ID NO:709, SEQ ID NO:710, SEQ ID NO:711, SEQ ID NO:712, SEQ ID NO:713, SEQ ID NO:714, SEQ ID NO:715, SEQ ID NO:716, SEQ ID NO:717, SEQ ID NO:718, SEQ ID NO:719, SEQ ID NO:720, SEQ ID NO:721, SEQ ID NO:722, SEQ ID NO:723, SEQ ID NO:724, SEQ ID NO:725, SEQ ID NO:726, SEQ ID NO:727, SEQ ID NO:728, SEQ ID NO:729, SEQ ID NO:730, SEQ ID NO:731, SEQ ID NO:732, SEQ ID NO:733, SEQ ID NO:734, SEQ ID NO:735, SEQ ID NO:736, SEQ ID NO:737, SEQ ID NO:738, SEQ ID NO:739, SEQ ID NO:740, SEQ ID NO:741, SEQ ID NO:742, SEQ ID NO:743, SEQ ID NO:744, SEQ ID NO:745, SEQ ID NO:746, SEQ ID NO:747, SEQ ID NO:748, SEQ ID NO:749, SEQ ID NO:750, SEQ ID NO:751, SEQ ID NO:752, SEQ ID NO:753, SEQ ID NO:754, SEQ ID NO:755, SEQ ID NO:756, SEQ ID NO:757, SEQ ID NO:758, SEQ ID NO:759, SEQ ID NO:760, SEQ ID NO:761, SEQ ID NO:762, SEQ ID NO:763, SEQ ID NO:764, SEQ ID NO:765, SEQ ID NO:766, SEQ ID NO:767, SEQ ID NO:768, SEQ ID NO:769, SEQ ID NO:770, SEQ ID NO:771, SEQ ID NO:772, SEQ ID NO:773, SEQ ID NO:774, SEQ ID NO:775, SEQ ID NO:776, SEQ ID NO:777, SEQ ID NO:778, SEQ ID NO:779, SEQ ID NO:780, SEQ ID NO:781, SEQ ID NO:782, SEQ ID NO:783, SEQ ID NO:784, SEQ ID NO:785, SEQ ID NO:786, SEQ ID NO:787, SEQ ID NO:788, SEQ ID NO:789, SEQ ID NO:790, SEQ ID NO:791, SEQ ID NO:792, SEQ ID NO:793, SEQ ID NO:794, SEQ ID NO:795, SEQ ID NO:796, SEQ ID NO:797, SEQ ID NO:798, SEQ ID NO:799, SEQ ID NO:800, SEQ ID NO:801, SEQ ID NO:802, SEQ ID NO:803, SEQ ID NO:804, SEQ ID NO:805, SEQ ID NO:806, SEQ ID NO:807, SEQ ID NO:808, SEQ ID NO:809, SEQ ID NO:810, SEQ ID NO:811, SEQ ID NO:812, SEQ ID NO:813, SEQ ID NO:814, SEQ ID NO:815, SEQ ID NO:816, SEQ ID NO:817, SEQ ID NO:818, SEQ ID NO:819, SEQ ID NO:820, SEQ ID NO:821, SEQ ID NO:822, SEQ ID NO:823, SEQ ID NO:824, SEQ ID NO:825, SEQ ID NO:826, SEQ ID NO:827, SEQ ID NO:828, SEQ ID NO:829, SEQ ID NO:830, SEQ ID NO:831, SEQ ID NO:832, SEQ ID NO:833, SEQ ID NO:834, SEQ ID NO:835, SEQ ID NO:836, SEQ ID NO:837, SEQ ID NO:838, SEQ ID NO:839, SEQ ID NO:840, SEQ ID NO:841, SEQ ID NO:842, SEQ ID NO:843, SEQ ID NO:844, SEQ ID NO:845, SEQ ID NO:846, SEQ ID NO:847, SEQ ID NO:848, SEQ ID NO:849, SEQ ID NO:850, SEQ ID NO:851, SEQ ID NO:852, SEQ ID NO:853, SEQ ID NO:854, SEQ ID NO:855, SEQ ID NO:856, SEQ ID NO:857, SEQ ID NO:858, SEQ ID NO:859, SEQ ID NO:860, SEQ ID NO:861, SEQ ID NO:862, SEQ ID NO:863, SEQ ID NO:864, SEQ ID NO:865, SEQ ID NO:866, SEQ ID NO:867, SEQ ID NO:868, SEQ ID NO:869, SEQ ID NO:870, SEQ ID NO:871, SEQ ID NO:872, SEQ ID NO:873, SEQ ID NO:874, SEQ ID NO:875, SEQ ID NO:876, SEQ ID NO:877, SEQ ID NO:878, SEQ ID NO:879, SEQ ID NO:880, SEQ ID NO:881, SEQ ID NO:882, SEQ ID NO:883, SEQ ID NO:884, SEQ ID NO:885, SEQ ID NO:886, SEQ ID NO:887, SEQ ID NO:888, SEQ ID NO:889, SEQ ID NO:890, SEQ ID NO:891, SEQ ID NO:892, SEQ ID NO:893, SEQ ID NO:894, SEQ ID NO:895, SEQ ID NO:896, SEQ ID NO:897, SEQ ID NO:898, SEQ ID NO:899, SEQ ID NO:900, SEQ ID NO:901, SEQ ID NO:902, SEQ ID NO:903, SEQ ID NO:904, SEQ ID NO:905, SEQ ID NO:906, SEQ ID NO:907, SEQ ID NO:908, SEQ ID NO:909, SEQ ID NO:910, SEQ ID NO:911, SEQ ID NO:912, SEQ ID NO:913, SEQ ID NO:914, SEQ ID NO:915, SEQ ID NO:916, SEQ ID NO:917, SEQ ID NO:918, SEQ ID NO:919, SEQ ID NO:920, SEQ ID NO:921, SEQ ID NO:922, SEQ ID NO:923, SEQ ID NO:924, SEQ ID NO:925, SEQ ID NO:926, SEQ ID NO:927, SEQ ID NO:928, SEQ ID NO:929, SEQ ID NO:930, SEQ ID NO:931, SEQ ID NO:932, SEQ ID NO:933, SEQ ID NO:934, SEQ ID NO:935, SEQ ID NO:936, SEQ ID NO:937, SEQ ID NO:938, SEQ ID NO:939, SEQ ID NO:940, SEQ ID NO:941, SEQ ID NO:942, SEQ ID NO:943, SEQ ID NO:944, SEQ ID NO:945, SEQ ID NO:946, SEQ ID NO:947, SEQ ID NO:948, SEQ ID NO:949, SEQ ID NO:950, SEQ ID NO:951, SEQ ID NO:952, SEQ ID NO:953, SEQ ID NO:954, SEQ ID NO:955, SEQ ID NO:956, SEQ ID NO:957, SEQ ID NO:958, SEQ ID NO:959, SEQ ID NO:960, SEQ ID NO:961, SEQ ID NO:962, SEQ ID NO:963, SEQ ID NO:964, SEQ ID NO:965, SEQ ID NO:966, SEQ ID NO:967, SEQ ID NO:968, SEQ ID NO:969, SEQ ID NO:970, SEQ ID NO:971, SEQ ID NO:972, SEQ ID NO:973, SEQ ID NO:974, SEQ ID NO:975, SEQ ID NO:976, SEQ ID NO:977, SEQ ID NO:978, SEQ ID NO:979, SEQ ID NO:980, SEQ ID NO:981, SEQ ID NO:982, SEQ ID NO:983, SEQ ID NO:984, SEQ ID NO:985, SEQ ID NO:986, SEQ ID NO:987, SEQ ID NO:988, SEQ ID NO:989, SEQ ID NO:990, SEQ ID NO:991, SEQ ID NO:992, SEQ ID NO:993, SEQ ID NO:994, SEQ ID NO:995, SEQ ID NO:996, SEQ ID NO:997, SEQ ID NO:998, SEQ ID NO:999, SEQ ID NO:1000, SEQ ID NO:1001, SEQ ID NO:1002, SEQ ID NO:1003, SEQ ID NO:1004, SEQ ID NO:1005, SEQ ID NO:1006, SEQ ID NO:1007, SEQ ID NO:1008, SEQ ID NO:1009, SEQ ID NO:1010, SEQ ID NO:1011, SEQ ID NO:1012, SEQ ID NO:1013, SEQ ID NO:1014, SEQ ID NO:1015, SEQ ID NO:1016, SEQ ID NO:1017, SEQ ID NO:1018, SEQ ID NO:1019, SEQ ID NO:1020, SEQ ID NO:1021, SEQ ID NO:1022, SEQ ID NO:1023, SEQ ID NO:1024, SEQ ID NO:1025, SEQ ID NO:1026, SEQ ID NO:1027, SEQ ID NO:1028, SEQ ID NO:1029, SEQ ID NO:1030, SEQ ID NO:1031, SEQ ID NO:1032, SEQ ID NO:1033, SEQ ID NO:1034, SEQ ID NO:1035, SEQ ID NO:1036, SEQ ID NO:1037, SEQ ID NO:1038, SEQ ID NO:1039, SEQ ID NO:1040, SEQ ID NO:1041, SEQ ID NO:1042, SEQ ID NO:1043, SEQ ID NO:1044, SEQ ID NO:1045, SEQ ID NO:1046, SEQ ID NO:1047, SEQ ID NO:1048, SEQ ID NO:1049, SEQ ID NO:1050, SEQ ID NO:1051, SEQ ID NO:1052, SEQ ID NO:1053, SEQ ID NO:1054, SEQ ID NO:1055, SEQ ID NO:1056, SEQ ID NO:1057, SEQ ID NO:1058, SEQ ID NO:1059, SEQ ID NO:1060, SEQ ID NO:1061, SEQ ID NO:1062, SEQ ID NO:1063, SEQ ID NO:1064, SEQ ID NO:1065, SEQ ID NO:1066, SEQ ID NO:1067, SEQ ID NO:1068, SEQ ID NO:1069, SEQ ID NO:1070, SEQ ID NO:1071, SEQ ID NO:1072, SEQ ID NO:1073, SEQ ID NO:1074, SEQ ID NO:1075, SEQ ID NO:1076, SEQ ID NO:1077, SEQ ID NO:1078, SEQ ID NO:1079, SEQ ID NO:1080, SEQ ID NO:1081, SEQ ID NO:1082, SEQ ID NO:1083, SEQ ID NO:1084, SEQ ID NO:1085, SEQ ID NO:1086, SEQ ID NO:1087, SEQ ID NO:1088, SEQ ID NO:1089, SEQ ID NO:1090, SEQ ID NO:1091, SEQ ID NO:1092, SEQ ID NO:1093, SEQ ID NO:1094, SEQ ID NO:1095, SEQ ID NO:1096, SEQ ID NO:1097, SEQ ID NO:1098, SEQ ID NO:1099, SEQ ID NO:1100, SEQ ID NO:1101, SEQ ID NO:1102, SEQ ID NO:1103, SEQ ID NO:1104, SEQ ID NO:1105, SEQ ID NO:1106, SEQ ID NO:1107, SEQ ID NO:1108, SEQ ID NO:1109, SEQ ID NO:1110, SEQ ID NO:1111, SEQ ID NO:1112, SEQ ID NO:1113, SEQ ID NO:1114, SEQ ID NO:1115, SEQ ID NO:1116, SEQ ID NO:1117, SEQ ID NO:1118, SEQ ID NO:1119, SEQ ID NO:1120, SEQ ID NO:1121, SEQ ID NO:1122, SEQ ID NO:1123, SEQ ID NO:1124, SEQ ID NO:1125, SEQ ID NO:1126, SEQ ID NO:1127, SEQ ID NO:1128, SEQ ID NO:1129, SEQ ID NO:1130, SEQ ID NO:1131, SEQ ID NO:1132, SEQ ID NO:1133, SEQ ID NO:1134, SEQ ID NO:1135, SEQ ID NO:1136, SEQ ID NO:1137, SEQ ID NO:1138, SEQ ID NO:1139, SEQ ID NO:1140, SEQ ID NO:1141, SEQ ID NO:1142, SEQ ID NO:1143, SEQ ID NO:1144, SEQ ID NO:1145, SEQ ID NO:1146, SEQ ID NO:1147, SEQ ID NO:1148, SEQ ID NO:1149, SEQ ID NO:1150, SEQ ID NO:1151, SEQ ID NO:1152, SEQ ID NO:1153, SEQ ID NO:1154, SEQ ID NO:1155, SEQ ID NO:1156, SEQ ID NO:1157, SEQ ID NO:1158, SEQ ID NO:1159, SEQ ID NO:1160, SEQ ID NO:1161, SEQ ID NO:1162, SEQ ID NO:1163, SEQ ID NO:1164, SEQ ID NO:1165, SEQ ID NO:1166, SEQ ID NO:1167, SEQ ID NO:1168, SEQ ID NO:1169, SEQ ID NO:1170, SEQ ID NO:1171, SEQ ID NO:1172, SEQ ID NO:1173, SEQ ID NO:1174, SEQ ID NO:1175, SEQ ID NO:1176, SEQ ID NO:1177, SEQ ID NO:1178, SEQ ID NO:1179, SEQ ID NO:1180, SEQ ID NO:1181, SEQ ID NO:1182, SEQ ID NO:1183, SEQ ID NO:1184, SEQ ID NO:1185, SEQ ID NO:1186, SEQ ID NO:1187, SEQ ID NO:1188, SEQ ID NO:1189, SEQ ID NO:1190, SEQ ID NO:1191, SEQ ID NO:1192, SEQ ID NO:1193, SEQ ID NO:1194, SEQ ID NO:1195, SEQ ID NO:1196, SEQ ID NO:1197, SEQ ID NO:1198, SEQ ID NO:1199, SEQ ID NO:1200, SEQ ID NO:1201, SEQ ID NO:1202, SEQ ID NO:1203, SEQ ID NO:1204, SEQ ID NO:1205, SEQ ID NO:1206, SEQ ID NO:1207, SEQ ID NO:1208, SEQ ID NO:1209, SEQ ID NO:1210, SEQ ID NO:1211, SEQ ID NO:1212, SEQ ID NO:1213, SEQ ID NO:1214, SEQ ID NO:1215, SEQ ID NO:1216, SEQ ID NO:1217, SEQ ID NO:1218, SEQ ID NO:1219, SEQ ID NO:1220, SEQ ID NO:1221, SEQ ID NO:1222, SEQ ID NO:1223, SEQ ID NO:1224, SEQ ID NO:1225, SEQ ID NO:1226, SEQ ID NO:1227, SEQ ID NO:1228, SEQ ID NO:1229, SEQ ID NO:1230, SEQ ID NO:1231, SEQ ID NO:1232, SEQ ID NO:1233, SEQ ID NO:1234, SEQ ID NO:1235, SEQ ID NO:1236, SEQ ID NO:1237, SEQ ID NO:1238, SEQ ID NO:1239, SEQ ID NO:1240, SEQ ID NO:1241, SEQ ID NO:1242, SEQ ID NO:1243, SEQ ID NO:1244, SEQ ID NO:1245, SEQ ID NO:1246, SEQ ID NO:1247, SEQ ID NO:1248, SEQ ID NO:1249, SEQ ID NO:1250, SEQ ID NO:1251, SEQ ID NO:1252, SEQ ID NO:1253, SEQ ID NO:1254, SEQ ID NO:1255, SEQ ID NO:1256, SEQ ID NO:1257, SEQ ID NO:1258, SEQ ID NO:1259, SEQ ID NO:1260, SEQ ID NO:1261, SEQ ID NO:1262, SEQ ID NO:1263, SEQ ID NO:1264, SEQ ID NO:1265, SEQ ID NO:1266, SEQ ID NO:1267, SEQ ID NO:1268, SEQ ID NO:1269, SEQ ID NO:1270, SEQ ID NO:1271, SEQ ID NO:1272, SEQ ID NO:1273, SEQ ID NO:1274, SEQ ID NO:1275, SEQ ID NO:1276, SEQ ID NO:1277, SEQ ID NO:1278, SEQ ID NO:1279, SEQ ID NO:1280, SEQ ID NO:1281, SEQ ID NO:1282, SEQ ID NO:1283, SEQ ID NO:1284, SEQ ID NO:1285, SEQ ID NO:1286, SEQ ID NO:1287, SEQ ID NO:1288, SEQ ID NO:1289, SEQ ID NO:1290, SEQ ID NO:1291, SEQ ID NO:1292, SEQ ID NO:1293, SEQ ID NO:1294, SEQ ID NO:1295, SEQ ID NO:1296, SEQ ID NO:1297, SEQ ID NO:1298, SEQ ID NO:1299, SEQ ID NO:1300, SEQ ID NO:1301, SEQ ID NO:1302, SEQ ID NO:1303, SEQ ID NO:1304, SEQ ID NO:1305, SEQ ID NO:1306, SEQ ID NO:1307, SEQ ID NO:1308, SEQ ID NO:1309, SEQ ID NO:1310, SEQ ID NO:1311, SEQ ID NO:1312, SEQ ID NO:1313, SEQ ID NO:1314, SEQ ID NO:1315, SEQ ID NO:1316, SEQ ID NO:1317, SEQ ID NO:1318, SEQ ID NO:1319, SEQ ID NO:1320, SEQ ID NO:1321, SEQ ID NO:1322, SEQ ID NO:1323, SEQ ID NO:1324, SEQ ID NO:1325, SEQ ID NO:1326, SEQ ID NO:1327, SEQ ID NO:1328, SEQ ID NO:1329, SEQ ID NO:1330, SEQ ID NO:1331, SEQ ID NO:1332, SEQ ID NO:1333, SEQ ID NO:1334, SEQ ID NO:1335, SEQ ID NO:1336, SEQ ID NO:1337, SEQ ID NO:1338, SEQ ID NO:1339, SEQ ID NO:1340, SEQ ID NO:1341, SEQ ID NO:1342, SEQ ID NO:1343, SEQ ID NO:1344, SEQ ID NO:1345, SEQ ID NO:1346, SEQ ID NO:1347, SEQ ID NO:1348, SEQ ID NO:1349, SEQ ID NO:1350, SEQ ID NO:1351, SEQ ID NO:1352, SEQ ID NO:1353, SEQ ID NO:1354, SEQ ID NO:1355, SEQ ID NO:1356, SEQ ID NO:1357, SEQ ID NO:1358, SEQ ID NO:1359, SEQ ID NO:1360, SEQ ID NO:1361, SEQ ID NO:1362, SEQ ID NO:1363, SEQ ID NO:1364, SEQ ID NO:1365, SEQ ID NO:1366, SEQ ID NO:1367, SEQ ID NO:1368, SEQ ID NO:1369, SEQ ID NO:1370, SEQ ID NO:1371, SEQ ID NO:1372, SEQ ID NO:1373, SEQ ID NO:1374, SEQ ID NO:1375, SEQ ID NO:1376, SEQ ID NO:1377, SEQ ID NO:1378, SEQ ID NO:1379, SEQ ID NO:1380, SEQ ID NO:1381, SEQ ID NO:1382, SEQ ID NO:1383, SEQ ID NO:1384, SEQ ID NO:1385, SEQ ID NO:1386, SEQ ID NO:1387, SEQ ID NO:1388, SEQ ID NO:1389, SEQ ID NO:1390, SEQ ID NO:1391, SEQ ID NO:1392, SEQ ID NO:1393, SEQ ID NO:1394, SEQ ID NO:1395, SEQ ID NO:1396, SEQ ID NO:1397, SEQ ID NO:1398, SEQ ID NO:1399, SEQ ID NO:1400, SEQ ID NO:1401, SEQ ID NO:1402, SEQ ID NO:1403, SEQ ID NO:1404, SEQ ID NO:1405, SEQ ID NO:1406, SEQ ID NO:1407, SEQ ID NO:1408, SEQ ID NO:1409, SEQ ID NO:1410, SEQ ID NO.1411, SEQ ID NO:1412, SEQ ID NO:1413, SEQ ID NO:1414, SEQ ID NO:1415, SEQ ID NO:1416, SEQ ID NO:1417, SEQ ID NO:1418, SEQ ID NO:1419, SEQ ID NO:1420, SEQ ID NO:1421, SEQ ID NO:1422, SEQ ID NO:1423, SEQ ID NO:1424, SEQ ID NO:1425, SEQ ID NO:1426, SEQ ID NO:1427, SEQ ID NO:1428, SEQ ID NO:1429, SEQ ID NO:1430, SEQ ID NO:1431, SEQ ID NO:1432, SEQ ID NO:1433, SEQ ID NO:1434, SEQ ID NO:1435, SEQ ID NO:1436, SEQ ID NO:1437, SEQ ID NO:1438, SEQ ID NO:1439, SEQ ID NO:1440, SEQ ID NO:1441, SEQ ID NO:1442, SEQ ID NO:1443, SEQ ID NO:1444, SEQ ID NO:1445, SEQ ID NO:1446, SEQ ID NO:1447, SEQ ID NO:1448, SEQ ID NO:1449, SEQ ID NO:1450, SEQ ID NO:1451, SEQ ID NO:1452, SEQ ID NO:1453, SEQ ID NO:1454, SEQ ID NO:1455, SEQ ID NO:1456, SEQ ID NO:1457, SEQ ID NO:1458, SEQ ID NO:1459, SEQ ID NO:1460, SEQ ID NO:1461, SEQ ID NO:1462, SEQ ID NO:1463, SEQ ID NO:1464, SEQ ID NO:1465, SEQ ID NO:1466, SEQ ID NO:1467, SEQ ID NO:1468, SEQ ID NO.1469, SEQ ID NO:1470, SEQ ID NO:1471, SEQ ID NO:1472, SEQ ID NO:1473, SEQ ID NO:1474, SEQ ID NO:1475, SEQ ID NO:1476, SEQ ID NO:1477, SEQ ID NO:1478, SEQ ID NO:1479, SEQ ID NO:1480, SEQ ID NO:1481, SEQ ID NO:1482, SEQ ID NO:1483, SEQ ID NO:1484, SEQ ID NO:1485, SEQ ID NO:1486, SEQ ID NO:1487, SEQ ID NO:1488, SEQ ID NO:1489, SEQ ID NO:1490, SEQ ID NO:1491, SEQ ID NO:1492, SEQ ID NO:1493, SEQ ID NO:1494, SEQ ID NO:1495, SEQ ID NO:1496, SEQ ID NO:1497, SEQ ID NO:1498, SEQ ID NO:1499, SEQ ID NO:1500, SEQ ID NO:1501, SEQ ID NO:1502, SEQ ID NO:1503, SEQ ID NO:1504, SEQ ID NO:1505, SEQ ID NO:1506, SEQ ID NO:1507, SEQ ID NO:1508, SEQ ID NO:1509, SEQ ID NO:1510, SEQ ID NO:1511, SEQ ID NO:1512, SEQ ID NO:1513, SEQ ID NO:1514, SEQ ID NO:1515, SEQ ID NO:1516, SEQ ID NO:1517, SEQ ID NO:1518, and SEQ ID NO:1519;

[0011] or a complement of said sequence.

[0012] In further embodiments, the present invention provides an isolated polynucleotide consisting essentially of a nucleotide sequence selected from the group consisting of:

[0013] SEQ ID NO:1, SEQ ID NO:2, SEQ ID NO:3, SEQ ID NO:4, SEQ ID NO:5, SEQ ID NO:6, SEQ ID NO:7, SEQ ID NO:8, SEQ ID NO:9, SEQ ID NO:10, SEQ ID NO:11, SEQ ID NO:12, SEQ ID NO:13, SEQ ID NO:14, SEQ ID NO:15, SEQ ID NO:16, SEQ ID NO:17, SEQ ID NO:18, SEQ ID NO:19, SEQ ID NO:20, SEQ ID NO:21, SEQ ID NO:22, SEQ ID NO:23, SEQ ID NO:24, SEQ ID NO:25, SEQ ID NO:26, SEQ ID NO:27, SEQ ID NO:28, SEQ ID NO:29, SEQ ID NO:30, SEQ ID NO:31, SEQ ID NO:32, SEQ ID NO:33, SEQ ID NO:34, SEQ ID NO:35, SEQ ID NO:36, SEQ ID NO:37, SEQ ID NO:38, SEQ ID NO:39, SEQ ID NO:40, SEQ ID NO:41, SEQ ID NO:42, SEQ ID NO:43, SEQ ID NO:44, SEQ ID NO:45, SEQ ID NO:46, SEQ ID NO:47, SEQ ID NO:48, SEQ ID NO:49, SEQ ID NO:50, SEQ ID NO:51, SEQ ID NO:52, SEQ ID NO:53, SEQ ID NO:54, SEQ ID NO:55, SEQ ID NO:56, SEQ ID NO:57, SEQ ID NO:58, SEQ ID NO:59, SEQ ID NO:60, SEQ ID NO:61, SEQ ID NO:62, SEQ ID NO:63, SEQ ID NO:64, SEQ ID NO:65, SEQ ID NO:66, SEQ ID NO:67, SEQ ID NO:68, SEQ ID NO:69, SEQ ID NO:70, SEQ ID NO:71, SEQ ID NO:72, SEQ ID NO:73, SEQ ID NO:74, SEQ ID NO:75, SEQ ID NO:76, SEQ ID NO:77, SEQ ID NO:78, SEQ ID NO:79, SEQ ID NO:80, SEQ ID NO:81, SEQ ID NO:82, SEQ ID NO:83, SEQ ID NO:84, SEQ ID NO:85, SEQ ID NO:86, SEQ ID NO:87, SEQ ID NO:88, SEQ ID NO:89, SEQ ID NO:90, SEQ ID NO:91, SEQ ID NO:92, SEQ ID NO:93, SEQ ID NO:94, SEQ ID NO:95, SEQ ID NO:96, SEQ ID NO:97, SEQ ID NO:98, SEQ ID NO:99, SEQ ID NO:100, SEQ ID NO:101, SEQ ID NO:102, SEQ ID NO:103, SEQ ID NO:104, SEQ ID NO:105, SEQ ID NO:106, SEQ ID NO:107, SEQ ID NO:108, SEQ ID NO:109, SEQ ID NO:110, SEQ ID NO:111, SEQ ID NO:112, SEQ ID NO:113, SEQ ID NO:114, SEQ ID NO:115, SEQ ID NO:116, SEQ ID NO:117, SEQ ID NO:118, SEQ ID NO:119, SEQ ID NO:120, SEQ ID NO:121, SEQ ID NO:122, SEQ ID NO:123, SEQ ID NO:124, SEQ ID NO:125, SEQ ID NO:126, SEQ ID NO:127, SEQ ID NO:128, SEQ ID NO:129, SEQ ID NO:130, SEQ ID NO:131, SEQ ID NO:132, SEQ ID NO:133, SEQ ID NO:134, SEQ ID NO:135, SEQ ID NO:136, SEQ ID NO:137, SEQ ID NO:138, SEQ ID NO:139, SEQ ID NO:140, SEQ ID NO:141, SEQ ID NO:142, SEQ ID NO:143, SEQ ID NO:144, SEQ ID NO:145, SEQ ID NO:146, SEQ ID NO:147, SEQ ID NO:148, SEQ ID NO:149, SEQ ID NO:150, SEQ ID NO:151, SEQ ID NO:152, SEQ ID NO:153, SEQ ID NO:154, SEQ ID NO:155, SEQ ID NO:156, SEQ ID NO:157, SEQ ID NO:158, SEQ ID NO:159, SEQ ID NO:160, SEQ ID NO:161, SEQ ID NO:162, SEQ ID NO:163, SEQ ID NO:164, SEQ ID NO:165, SEQ ID NO:166, SEQ ID NO:167, SEQ ID NO:168, SEQ ID NO:169, SEQ ID NO:170, SEQ ID NO:171, SEQ ID NO:172, SEQ ID NO:173, SEQ ID NO:174, SEQ ID NO:175, SEQ ID NO:176, SEQ ID NO:177, SEQ ID NO:178, SEQ ID NO:179, SEQ ID NO:180, SEQ ID NO:181, SEQ ID NO:182, SEQ ID NO:183, SEQ ID NO:184, SEQ ID NO:185, SEQ ID NO:186, SEQ ID NO:187, SEQ ID NO:188, SEQ ID NO:189, SEQ ID NO:190, SEQ ID NO:191, SEQ ID NO:192, SEQ ID NO:193, SEQ ID NO:194, SEQ ID NO:195, SEQ ID NO:196, SEQ ID NO:197, SEQ ID NO:198, SEQ ID NO:199, SEQ ID NO:200, SEQ ID NO:201, SEQ ID NO:202, SEQ ID NO:203, SEQ ID NO:204, SEQ ID NO:205, SEQ ID NO:206, SEQ ID NO:207, SEQ ID NO:208, SEQ ID NO:209, SEQ ID NO:210, SEQ ID NO:211, SEQ ID NO:212, SEQ ID NO:213, SEQ ID NO:214, SEQ ID NO:215, SEQ ID NO:216, SEQ ID NO:217, SEQ ID NO:218, SEQ ID NO:219, SEQ ID NO:220, SEQ ID NO:221, SEQ ID NO:222, SEQ ID NO:223, SEQ ID NO:224, SEQ ID NO:225, SEQ ID NO:226, SEQ ID NO:227, SEQ ID NO:228, SEQ ID NO:229, SEQ ID NO:230, SEQ ID NO:231, SEQ ID NO:232, SEQ ID NO:233, SEQ ID NO:234, SEQ ID NO:235, SEQ ID NO:236, SEQ ID NO:237, SEQ ID NO:238, SEQ ID NO:239, SEQ ID NO:240, SEQ ID NO:241, SEQ ID NO:242, SEQ ID NO:243, SEQ ID NO:244, SEQ ID NO:245, SEQ ID NO:246, SEQ ID NO:247, SEQ ID NO:248, SEQ ID NO:249, SEQ ID NO:250, SEQ ID NO:251, SEQ ID NO:252, SEQ ID NO:253, SEQ ID NO:254, SEQ ID NO:255, SEQ ID NO:256, SEQ ID NO:257, SEQ ID NO:258, SEQ ID NO:259, SEQ ID NO:260, SEQ ID NO:261, SEQ ID NO:262, SEQ ID NO:263, SEQ ID NO:264, SEQ ID NO:265, SEQ ID NO:266, SEQ ID NO:267, SEQ ID NO:268, SEQ ID NO:269, SEQ ID NO:270, SEQ ID NO:271, SEQ ID NO:272, SEQ ID NO:273, SEQ ID NO:274, SEQ ID NO:275, SEQ ID NO:276, SEQ ID NO:277, SEQ ID NO:278, SEQ ID NO:279, SEQ ID NO:280, SEQ ID NO:281, SEQ ID NO:282, SEQ ID NO:283, SEQ ID NO:284, SEQ ID NO:285, SEQ ID NO:286, SEQ ID NO:287, SEQ ID NO:288, SEQ ID NO:289, SEQ ID NO:290, SEQ ID NO:291, SEQ ID NO:292, SEQ ID NO:293, SEQ ID NO:294, SEQ ID NO:295, SEQ ID NO:296, SEQ ID NO:297, SEQ ID NO:298, SEQ ID NO:299, SEQ ID NO:300, SEQ ID NO:301, SEQ ID NO:302, SEQ ID NO:303, SEQ ID NO:304, SEQ ID NO:305, SEQ ID NO:306, SEQ ID NO:307, SEQ ID NO:308, SEQ ID NO:309, SEQ ID NO:310, SEQ ID NO:311, SEQ ID NO:312, SEQ ID NO:313, SEQ ID NO:314, SEQ ID NO:315, SEQ ID NO:316, SEQ ID NO:317, SEQ ID NO:318, SEQ ID NO:319, SEQ ID NO:320, SEQ ID NO:321, SEQ ID NO:322, SEQ ID NO:323, SEQ ID NO:324, SEQ ID NO:325, SEQ ID NO:326, SEQ ID NO:327, SEQ ID NO:328, SEQ ID NO:329, SEQ ID NO:330, SEQ ID NO:331, SEQ ID NO.332, SEQ ID NO:333, SEQ ID NO:334, SEQ ID NO:335, SEQ ID NO:336, SEQ ID NO:337, SEQ ID NO:338, SEQ ID NO:339, SEQ ID NO:340, SEQ ID NO:341, SEQ ID NO:342, SEQ ID NO:343, SEQ ID NO:344, SEQ ID NO:345, SEQ ID NO:346, SEQ ID NO:347, SEQ ID NO:348, SEQ ID NO:349, SEQ ID NO:350, SEQ ID NO:351, SEQ ID NO:352, SEQ ID NO:353, SEQ ID NO:354, SEQ ID NO:355, SEQ ID NO:356, SEQ ID NO:357, SEQ ID NO:358, SEQ ID NO:359, SEQ ID NO:360, SEQ ID NO:361, SEQ ID NO:362, SEQ ID NO:363, SEQ ID NO:364, SEQ ID NO:365, SEQ ID NO:366, SEQ ID NO:367, SEQ ID NO:368, SEQ ID NO:369, SEQ ID NO:370, SEQ ID NO:371, SEQ ID NO:372, SEQ ID NO:373, SEQ ID NO:374, SEQ ID NO:375, SEQ ID NO:376, SEQ ID NO:377, SEQ ID NO:378, SEQ ID NO:379, SEQ ID NO:380, SEQ ID NO:381, SEQ ID NO:382, SEQ ID NO:383, SEQ ID NO:384, SEQ ID NO:385, SEQ ID NO:386, SEQ ID NO:387, SEQ ID NO:388, SEQ ID NO:389, SEQ ID NO:390, SEQ ID NO:391, SEQ ID NO:392, SEQ ID NO:393, SEQ ID NO:394, SEQ ID NO:395, SEQ ID NO:396, SEQ ID NO:397, SEQ ID NO:398, SEQ ID NO:399, SEQ ID NO:400, SEQ ID NO:401, SEQ ID NO:402, SEQ ID NO:403, SEQ ID NO:404, SEQ ID NO:405, SEQ ID NO:406, SEQ ID NO:407, SEQ ID NO:408, SEQ ID NO:409, SEQ ID NO:410, SEQ ID NO:411, SEQ ID NO:412, SEQ ID NO:413, SEQ ID NO:414, SEQ ID NO:415, SEQ ID NO:416, SEQ ID NO:417, SEQ ID NO:418, SEQ ID NO:419, SEQ ID NO:420, SEQ ID NO:421, SEQ ID NO:422, SEQ ID NO:423, SEQ ID NO:424, SEQ ID NO:425, SEQ ID NO:426, SEQ ID NO:427, SEQ ID NO:428, SEQ ID NO:429, SEQ ID NO:430, SEQ ID NO:431, SEQ ID NO:432, SEQ ID NO:433, SEQ ID NO:434, SEQ ID NO:435, SEQ ID NO:436, SEQ ID NO:437, SEQ ID NO:438, SEQ ID NO:439, SEQ ID NO:440, SEQ ID NO:441, SEQ ID NO:442, SEQ ID NO:443, SEQ ID NO:444, SEQ ID NO:445, SEQ ID NO:446, SEQ ID NO:447, SEQ ID NO:448, SEQ ID NO:449, SEQ ID NO:450, SEQ ID NO:451, SEQ ID NO:452, SEQ ID NO:453, SEQ ID NO:454, SEQ ID NO:455, SEQ ID NO:456, SEQ ID NO:457, SEQ ID NO:458, SEQ ID NO:459, SEQ ID NO:460, SEQ ID NO:461, SEQ ID NO:462, SEQ ID NO:463, SEQ ID NO:464, SEQ ID NO:465, SEQ ID NO:466, SEQ ID NO:467, SEQ ID NO:468, SEQ ID NO:469, SEQ ID NO:470, SEQ ID NO:471, SEQ ID NO:472, SEQ ID NO:473, SEQ ID NO:474, SEQ ID NO:475, SEQ ID NO:476, SEQ ID NO:477, SEQ ID NO:478, SEQ ID NO:479, SEQ ID NO:480, SEQ ID NO:481, SEQ ID NO:482, SEQ ID NO:483, SEQ ID NO:484, SEQ ID NO:485, SEQ ID NO:486, SEQ ID NO:487, SEQ ID NO:488, SEQ ID NO:489, SEQ ID NO:490, SEQ ID NO:491, SEQ ID NO:492, SEQ ID NO:493, SEQ ID NO:494, SEQ ID NO:495, SEQ ID NO:496, SEQ ID NO:497, SEQ ID NO:498, SEQ ID NO:499, SEQ ID NO:500, SEQ ID NO:501, SEQ ID NO:502, SEQ ID NO:503, SEQ ID NO:504, SEQ ID NO:505, SEQ ID NO:506, SEQ ID NO:507, SEQ ID NO:508, SEQ ID NO:509, SEQ ID NO:510, SEQ ID NO:511, SEQ ID NO:512, SEQ ID NO:513, SEQ ID NO:514, SEQ ID NO:515, SEQ ID NO:516, SEQ ID NO:517, SEQ ID NO:518, SEQ ID NO:519, SEQ ID NO:520, SEQ ID NO:521, SEQ ID NO:522, SEQ ID NO:523, SEQ ID NO:524, SEQ ID NO:525, SEQ ID NO:526, SEQ ID NO:527, SEQ ID NO:528, SEQ ID NO:529, SEQ ID NO:530, SEQ ID NO:531, SEQ ID NO:532, SEQ ID NO:533, SEQ ID NO:534, SEQ ID NO:535, SEQ ID NO:536, SEQ ID NO:537, SEQ ID NO:538, SEQ ID NO:539, SEQ ID NO:540, SEQ ID NO:541, SEQ ID NO:542, SEQ ID NO:543, SEQ ID NO:544, SEQ ID NO:545, SEQ ID NO:546, SEQ ID NO:547, SEQ ID NO:548, SEQ ID NO:549, SEQ ID NO:550, SEQ ID NO:551, SEQ ID NO:552, SEQ ID NO:553, SEQ ID NO:554, SEQ ID NO:555, SEQ ID NO:556, SEQ ID NO:557, SEQ ID NO:558, SEQ ID NO:559, SEQ ID NO:560, SEQ ID NO:561, SEQ ID NO:562, SEQ ID NO:563, SEQ ID NO:564, SEQ ID NO:565, SEQ ID NO:566, SEQ ID NO:567, SEQ ID NO:568, SEQ ID NO:569, SEQ ID NO:570, SEQ ID NO:571, SEQ ID NO:572, SEQ ID NO:573, SEQ ID NO:574, SEQ ID NO:575, SEQ ID NO:576, SEQ ID NO:577, SEQ ID NO:578, SEQ ID NO:579, SEQ ID NO:580, SEQ ID NO:581, SEQ ID NO:582, SEQ ID NO:583, SEQ ID NO:584, SEQ ID NO:585, SEQ ID NO:586, SEQ ID NO:587, SEQ ID NO:588, SEQ ID NO:589, SEQ ID NO:590, SEQ ID NO:591, SEQ ID NO:592, SEQ ID NO:593, SEQ ID NO:594, SEQ ID NO:595, SEQ ID NO:596, SEQ ID NO:597, SEQ ID NO:598, SEQ ID NO:599, SEQ ID NO:600, SEQ ID NO:601, SEQ ID NO:602, SEQ ID NO:603, SEQ ID NO:604, SEQ ID NO:605, SEQ ID NO:606, SEQ ID NO:607, SEQ ID NO:608, SEQ ID NO:609, SEQ ID NO:610, SEQ ID NO:611, SEQ ID NO:612, SEQ ID NO:613, SEQ ID NO:614, SEQ ID NO:615, SEQ ID NO:616, SEQ ID NO:617, SEQ ID NO:618, SEQ ID NO:619, SEQ ID NO:620, SEQ ID NO:621, SEQ ID NO:622, SEQ ID NO:623, SEQ ID NO:624, SEQ ID NO:625, SEQ ID NO:626, SEQ ID NO:627, SEQ ID NO:628, SEQ ID NO:629, SEQ ID NO:630, SEQ ID NO:631, SEQ ID NO:632, SEQ ID NO:633, SEQ ID NO:634, SEQ ID NO:635, SEQ ID NO:636, SEQ ID NO:637, SEQ ID NO:638, SEQ ID NO:639, SEQ ID NO:640, SEQ ID NO:641, SEQ ID NO:642, SEQ ID NO:643, SEQ ID NO:644, SEQ ID NO:645, SEQ ID NO:646, SEQ ID NO:647, SEQ ID NO:648, SEQ ID NO:649, SEQ ID NO:650, SEQ ID NO:651, SEQ ID NO:652, SEQ ID NO:653, SEQ ID NO:654, SEQ ID NO:655, SEQ ID NO:656, SEQ ID NO:657, SEQ ID NO:658, SEQ ID NO:659, SEQ ID NO:660, SEQ ID NO:661, SEQ ID NO:662, SEQ ID NO:663, SEQ ID NO:664, SEQ ID NO:665, SEQ ID NO:666, SEQ ID NO:667, SEQ ID NO:668, SEQ ID NO:669, SEQ ID NO:670, SEQ ID NO:671, SEQ ID NO:672, SEQ ID NO:673, SEQ ID NO:674, SEQ ID NO:675, SEQ ID NO:676, SEQ ID NO:677, SEQ ID NO:678, SEQ ID NO:679, SEQ ID NO:680, SEQ ID NO:681, SEQ ID NO:682, SEQ ID NO:683, SEQ ID NO:684, SEQ ID NO:685, SEQ ID NO:686, SEQ ID NO:687, SEQ ID NO:688, SEQ ID NO:689, SEQ ID NO:690, SEQ ID NO:691, SEQ ID NO:692, SEQ ID NO:693, SEQ ID NO:694, SEQ ID NO:695, SEQ ID NO:696, SEQ ID NO:697, SEQ ID NO:698, SEQ ID NO:699, SEQ ID NO:700, SEQ ID NO:701, SEQ ID NO:702, SEQ ID NO:703, SEQ ID NO:704, SEQ ID NO:705, SEQ ID NO:706, SEQ ID NO:707, SEQ ID NO:708, SEQ ID NO:709, SEQ ID NO:710, SEQ ID NO:711, SEQ ID NO:712, SEQ ID NO:713, SEQ ID NO:714, SEQ ID NO:715, SEQ ID NO:716, SEQ ID NO:717, SEQ ID NO:718, SEQ ID NO:719, SEQ ID NO:720, SEQ ID NO:721, SEQ ID NO:722, SEQ ID NO:723, SEQ ID NO:724, SEQ ID NO:725, SEQ ID NO:726, SEQ ID NO:727, SEQ ID NO:728, SEQ ID NO:729, SEQ ID NO:730, SEQ ID NO:731, SEQ ID NO:732, SEQ ID NO:733, SEQ ID NO:734, SEQ ID NO:735, SEQ ID NO:736, SEQ ID NO:737, SEQ ID NO:738, SEQ ID NO:739, SEQ ID NO:740, SEQ ID NO:741, SEQ ID NO:742, SEQ ID NO:743, SEQ ID NO:744, SEQ ID NO:745, SEQ ID NO:746, SEQ ID NO:747, SEQ ID NO:748, SEQ ID NO:749, SEQ ID NO:750, SEQ ID NO:751, SEQ ID NO:752, SEQ ID NO:753, SEQ ID NO:754, SEQ ID NO:755, SEQ ID NO:756, SEQ ID NO:757, SEQ ID NO:758, SEQ ID NO:759, SEQ ID NO:760, SEQ ID NO:761, SEQ ID NO:762, SEQ ID NO:763, SEQ ID NO:764, SEQ ID NO:765, SEQ ID NO:766, SEQ ID NO:767, SEQ ID NO:768, SEQ ID NO:769, SEQ ID NO:770, SEQ ID NO:771, SEQ ID NO:772, SEQ ID NO:773, SEQ ID NO:774, SEQ ID NO:775, SEQ ID NO:776, SEQ ID NO:777, SEQ ID NO:778, SEQ ID NO:779, SEQ ID NO:780, SEQ ID NO:781, SEQ ID NO:782, SEQ ID NO:783, SEQ ID NO:784, SEQ ID NO:785, SEQ ID NO:786, SEQ ID NO:787, SEQ ID NO:788, SEQ ID NO:789, SEQ ID NO:790, SEQ ID NO:791, SEQ ID NO:792, SEQ ID NO:793, SEQ ID NO:794, SEQ ID NO:795, SEQ ID NO:796, SEQ ID NO:797, SEQ ID NO:798, SEQ ID NO:799, SEQ ID NO:800, SEQ ID NO:801, SEQ ID NO:802, SEQ ID NO:803, SEQ ID NO:804, SEQ ID NO:805, SEQ ID NO:806, SEQ ID NO:807, SEQ ID NO:808, SEQ ID NO:809, SEQ ID NO:810, SEQ ID NO:811, SEQ ID NO:812, SEQ ID NO:813, SEQ ID NO:814, SEQ ID NO:815, SEQ ID NO:816, SEQ ID NO:817, SEQ ID NO:818, SEQ ID NO:819, SEQ ID NO:820, SEQ ID NO:821, SEQ ID NO:822, SEQ ID NO:823, SEQ ID NO:824, SEQ ID NO:825, SEQ ID NO:826, SEQ ID NO:827, SEQ ID NO:828, SEQ ID NO:829, SEQ ID NO:830, SEQ ID NO:831, SEQ ID NO:832, SEQ ID NO:833, SEQ ID NO:834, SEQ ID NO:835, SEQ ID NO:836, SEQ ID NO:837, SEQ ID NO:838, SEQ ID NO:839, SEQ ID NO:840, SEQ ID NO:841, SEQ ID NO:842, SEQ ID NO:843, SEQ ID NO:844, SEQ ID NO:845, SEQ ID NO:846, SEQ ID NO:847, SEQ ID NO:848, SEQ ID NO:849, SEQ ID NO:850, SEQ ID NO:851, SEQ ID NO:852, SEQ ID NO:853, SEQ ID NO:854, SEQ ID NO:855, SEQ ID NO:856, SEQ ID NO:857, SEQ ID NO:858, SEQ ID NO:859, SEQ ID NO:860, SEQ ID NO:861, SEQ ID NO:862, SEQ ID NO:863, SEQ ID NO:864, SEQ ID NO:865, SEQ ID NO:866, SEQ ID NO:867, SEQ ID NO:868, SEQ ID NO:869, SEQ ID NO:870, SEQ ID NO:871, SEQ ID NO:872, SEQ ID NO:873, SEQ ID NO:874, SEQ ID NO:875, SEQ ID NO:876, SEQ ID NO:877, SEQ ID NO:878, SEQ ID NO:879, SEQ ID NO:880, SEQ ID NO:881, SEQ ID NO:882, SEQ ID NO:883, SEQ ID NO:884, SEQ ID NO:885, SEQ ID NO:886, SEQ ID NO:887, SEQ ID NO:888, SEQ ID NO:889, SEQ ID NO:890, SEQ ID NO:891, SEQ ID NO:892, SEQ ID NO:893, SEQ ID NO:894, SEQ ID NO:895, SEQ ID NO:896, SEQ ID NO:897, SEQ ID NO:898, SEQ ID NO:899, SEQ ID NO:910, SEQ ID NO:901, SEQ ID NO:902, SEQ ID NO:903, SEQ ID NO:904, SEQ ID NO:905, SEQ ID NO:906, SEQ ID NO:907, SEQ ID NO:908, SEQ ID NO:909, SEQ ID NO:910, SEQ ID NO:911, SEQ ID NO:912, SEQ ID NO:913, SEQ ID NO:914, SEQ ID NO:915, SEQ ID NO:916, SEQ ID NO:917, SEQ ID NO:918, SEQ ID NO:919, SEQ ID NO:920, SEQ ID NO:921, SEQ ID NO:922, SEQ ID NO:923, SEQ ID NO:924, SEQ ID NO:925, SEQ ID NO:926, SEQ ID NO:927, SEQ ID NO:928, SEQ ID NO:929, SEQ ID NO:930, SEQ ID NO:931, SEQ ID NO:932, SEQ ID NO:933, SEQ ID NO:934, SEQ ID NO:935, SEQ ID NO:936, SEQ ID NO:937, SEQ ID NO:938, SEQ ID NO:939, SEQ ID NO:940, SEQ ID NO:941, SEQ ID NO:942, SEQ ID NO:943, SEQ ID NO:944, SEQ ID NO:945, SEQ ID NO:946, SEQ ID NO:947, SEQ ID NO:948, SEQ ID NO:949, SEQ ID NO:950, SEQ ID NO:951, SEQ ID NO:952, SEQ ID NO:953, SEQ ID NO:954, SEQ ID NO:955, SEQ ID NO:956, SEQ ID NO:957, SEQ ID NO:958, SEQ ID NO:959, SEQ ID NO:960, SEQ ID NO:961, SEQ ID NO:962, SEQ ID NO:963, SEQ ID NO:964, SEQ ID NO:965, SEQ ID NO:966, SEQ ID NO:967, SEQ ID NO:968, SEQ ID NO:969, SEQ ID NO:970, SEQ ID NO:971, SEQ ID NO:972, SEQ ID NO:973, SEQ ID NO:974, SEQ ID NO:975, SEQ ID NO:976, SEQ ID NO:977, SEQ ID NO:978, SEQ ID NO:979, SEQ ID NO:980, SEQ ID NO:981, SEQ ID NO:982, SEQ ID NO:983, SEQ ID NO:984, SEQ ID NO:985, SEQ ID NO:986, SEQ ID NO:987, SEQ ID NO:988, SEQ ID NO:989, SEQ ID NO:990, SEQ ID NO:991, SEQ ID NO:992, SEQ ID NO:993, SEQ ID NO:994, SEQ ID NO:995, SEQ ID NO:996, SEQ ID NO:997, SEQ ID NO:998, SEQ ID NO:999, SEQ ID NO:1000, SEQ ID NO:1001, SEQ ID NO:1002, SEQ ID NO:1003, SEQ ID NO:1004, SEQ ID NO:1005, SEQ ID NO:1006, SEQ ID NO:1007, SEQ ID NO:1008, SEQ ID NO:1009, SEQ ID NO:1010, SEQ ID NO:1011, SEQ ID NO:1012, SEQ ID NO:1013, SEQ ID NO:1014, SEQ ID NO:1015, SEQ ID NO:1016, SEQ ID NO:1017, SEQ ID NO:1018, SEQ ID NO:1019, SEQ ID NO:1020, SEQ ID NO:1021, SEQ ID NO:1022, SEQ ID NO:1023, SEQ ID NO:1024, SEQ ID NO:1025, SEQ ID NO:1026, SEQ ID NO:1027, SEQ ID NO:1028, SEQ ID NO:1029, SEQ ID NO:1030, SEQ ID NO:1031, SEQ ID NO:1032, SEQ ID NO:1033, SEQ ID NO:1034, SEQ ID NO:1035, SEQ ID NO:1036, SEQ ID NO:1037, SEQ ID NO:1038, SEQ ID NO:1039, SEQ ID NO:1040, SEQ ID NO:1041, SEQ ID NO:1042, SEQ ID NO:1043, SEQ ID NO:1044, SEQ ID NO:1045, SEQ ID NO:1046, SEQ ID NO:1047, SEQ ID NO:1048, SEQ ID NO:1049, SEQ ID NO:1050, SEQ ID NO:1051, SEQ ID NO:1052, SEQ ID NO:1053, SEQ ID NO:1054, SEQ ID NO:1055, SEQ ID NO:1056, SEQ ID NO:1057, SEQ ID NO:1058, SEQ ID NO:1059, SEQ ID NO:1060, SEQ ID NO:1061, SEQ ID NO:1062, SEQ ID NO:1063, SEQ ID NO:1064, SEQ ID NO:1065, SEQ ID NO:1066, SEQ ID NO:1067, SEQ ID NO:1068, SEQ ID NO:1069, SEQ ID NO:1070, SEQ ID NO:1071, SEQ ID NO:1072, SEQ ID NO:1073, SEQ ID NO:1074, SEQ ID NO:1075, SEQ ID NO:1076, SEQ ID NO:1077, SEQ ID NO:1078, SEQ ID NO:1079, SEQ ID NO:1080, SEQ ID NO:1081, SEQ ID NO:1082, SEQ ID NO:1083, SEQ ID NO:1084, SEQ ID NO:1085, SEQ ID NO:1086, SEQ ID NO:1087, SEQ ID NO:1088, SEQ ID NO:1089, SEQ ID NO:1090, SEQ ID NO:1091, SEQ ID NO:1092, SEQ ID NO:1093, SEQ ID NO:1094, SEQ ID NO:1095, SEQ ID NO:1096, SEQ ID NO:1097, SEQ ID NO:1098, SEQ ID NO:1099, SEQ ID NO:1100, SEQ ID NO:1101, SEQ ID NO:1102, SEQ ID NO:1103, SEQ ID NO:1104, SEQ ID NO:1105, SEQ ID NO:1106, SEQ ID NO:1107, SEQ ID NO:1108, SEQ ID NO:1109, SEQ ID NO:1110, SEQ ID NO:1111, SEQ ID NO:1112, SEQ ID NO:1113, SEQ ID NO:1114, SEQ ID NO:1115, SEQ ID NO:1116, SEQ ID NO:1117, SEQ ID NO:1118, SEQ ID NO:1119, SEQ ID NO:1120, SEQ ID NO:1121, SEQ ID NO:1122, SEQ ID NO:1123, SEQ ID NO:1124, SEQ ID NO:1125, SEQ ID NO:1126, SEQ ID NO:1127, SEQ ID NO:1128, SEQ ID NO:1129, SEQ ID NO:1130, SEQ ID NO:1131, SEQ ID NO:1132, SEQ ID NO:1133, SEQ ID NO:1134, SEQ ID NO:1135, SEQ ID NO:1136, SEQ ID NO:1137, SEQ ID NO:1138, SEQ ID NO:1139, SEQ ID NO:1140, SEQ ID NO:1141, SEQ ID NO:1142, SEQ ID NO:1143, SEQ ID NO:1144, SEQ ID NO:1145, SEQ ID NO:1146, SEQ ID NO:1147, SEQ ID NO:1148, SEQ ID NO:1149, SEQ ID NO:1150, SEQ ID NO:1151, SEQ ID NO:1152, SEQ ID NO:1153, SEQ ID NO:1154, SEQ ID NO:1155, SEQ ID NO:1156, SEQ ID NO:1157, SEQ ID NO:1158, SEQ ID NO:1159, SEQ ID NO:1160, SEQ ID NO:1161, SEQ ID NO:1162, SEQ ID NO:1163, SEQ ID NO:1164, SEQ ID NO:1165, SEQ ID NO:1166, SEQ ID NO:1167, SEQ ID NO:1168, SEQ ID NO:1169, SEQ ID NO:1170, SEQ ID NO:1171, SEQ ID NO:1172, SEQ ID NO:1173, SEQ ID NO:1174, SEQ ID NO:1175, SEQ ID NO:1176, SEQ ID NO:1177, SEQ ID NO:1178, SEQ ID NO:1179, SEQ ID NO:1180, SEQ ID NO:1181, SEQ ID NO:1182, SEQ ID NO:1183, SEQ ID NO:1184, SEQ ID NO:1185, SEQ ID NO:1186, SEQ ID NO:1187, SEQ ID NO:1188, SEQ ID NO:1189, SEQ ID NO:1190, SEQ ID NO:1191, SEQ ID NO:1192, SEQ ID NO:1193, SEQ ID NO:1194, SEQ ID NO:1195, SEQ ID NO:1196, SEQ ID NO:1197, SEQ ID NO:1198, SEQ ID NO:1199, SEQ ID NO:1200, SEQ ID NO:1201, SEQ ID NO:1202, SEQ ID NO:1203, SEQ ID NO:1204, SEQ ID NO:1205, SEQ ID NO:1206, SEQ ID NO:1207, SEQ ID NO:1208, SEQ ID NO:1209, SEQ ID NO:1210, SEQ ID NO:1211, SEQ ID NO:1212, SEQ ID NO:1213, SEQ ID NO:1214, SEQ ID NO:1215, SEQ ID NO:1216, SEQ ID NO:1217, SEQ ID NO:1218, SEQ ID NO:1219, SEQ ID NO:1220, SEQ ID NO:1221, SEQ ID NO:1222, SEQ ID NO:1223, SEQ ID NO:1224, SEQ ID NO:1225, SEQ ID NO:1226, SEQ ID NO:1227, SEQ ID NO:1228, SEQ ID NO:1229, SEQ ID NO:1230, SEQ ID NO:1231, SEQ ID NO:1232, SEQ ID NO:1233, SEQ ID NO:1234, SEQ ID NO:1235, SEQ ID NO:1236, SEQ ID NO:1237, SEQ ID NO:1238, SEQ ID NO:1239, SEQ ID NO:1240, SEQ ID NO:1241, SEQ ID NO:1242, SEQ ID NO:1243, SEQ ID NO:1244, SEQ ID NO:1245, SEQ ID NO:1246, SEQ ID NO:1247, SEQ ID NO:1248, SEQ ID NO:1249, SEQ ID NO:1250, SEQ ID NO:1251, SEQ ID NO:1252, SEQ ID NO:1253, SEQ ID NO:1254, SEQ ID NO:1255, SEQ ID NO:1256, SEQ ID NO:1257, SEQ ID NO:1258, SEQ ID NO:1259, SEQ ID NO:1260, SEQ ID NO:1261, SEQ ID NO:1262, SEQ ID NO:1263, SEQ ID NO:1264, SEQ ID NO:1265, SEQ ID NO:1266, SEQ ID NO:1267, SEQ ID NO:1268, SEQ ID NO:1269, SEQ ID NO:1270, SEQ ID NO:1271, SEQ ID NO:1272, SEQ ID NO:1273, SEQ ID NO:1274, SEQ ID NO:1275, SEQ ID NO:1276, SEQ ID NO:1277, SEQ ID NO:1278, SEQ ID NO:1279, SEQ ID NO:1280, SEQ ID NO:1281, SEQ ID NO:1282, SEQ ID NO:1283, SEQ ID NO:1284, SEQ ID NO:1285, SEQ ID NO:1286, SEQ ID NO:1287, SEQ ID NO:1288, SEQ ID NO:1289, SEQ ID NO:1290, SEQ ID NO:1291, SEQ ID NO:1292, SEQ ID NO:1293, SEQ ID NO:1294, SEQ ID NO:1295, SEQ ID NO:1296, SEQ ID NO:1297, SEQ ID NO:1298, SEQ ID NO:1299, SEQ ID NO:1300, SEQ ID NO:1301, SEQ ID NO:1302, SEQ ID NO:1303, SEQ ID NO:1304, SEQ ID NO:1305, SEQ ID NO:1306, SEQ ID NO:1307, SEQ ID NO:1308, SEQ ID NO:1309, SEQ ID NO:1310, SEQ ID NO:1311, SEQ ID NO:1312, SEQ ID NO:1313, SEQ ID NO:1314, SEQ ID NO:1315, SEQ ID NO:1316, SEQ ID NO:1317, SEQ ID NO:1318, SEQ ID NO:1319, SEQ ID NO:1320, SEQ ID NO:1321, SEQ ID NO:1322, SEQ ID NO:1323, SEQ ID NO:1324, SEQ ID NO:1325, SEQ ID NO:1326, SEQ ID NO:1327, SEQ ID NO:1328, SEQ ID NO:1329, SEQ ID NO:1330, SEQ ID NO:1331, SEQ ID NO:1332, SEQ ID NO:1333, SEQ ID NO:1334, SEQ ID NO:1335, SEQ ID NO:1336, SEQ ID NO:1337, SEQ ID NO:1338, SEQ ID NO:1339, SEQ ID NO:1340, SEQ ID NO:1341, SEQ ID NO:1342, SEQ ID NO:1343, SEQ ID NO:1344, SEQ ID NO:1345, SEQ ID NO:1346, SEQ ID NO:1347, SEQ ID NO:1348, SEQ ID NO:1349, SEQ ID NO:1350, SEQ ID NO:1351, SEQ ID NO:1352, SEQ ID NO:1353, SEQ ID NO:1354, SEQ ID NO:1355, SEQ ID NO:1356, SEQ ID NO:1357, SEQ ID NO:1358, SEQ ID NO:1359, SEQ ID NO:1360, SEQ ID NO:1361, SEQ ID NO:1362, SEQ ID NO:1363, SEQ ID NO:1364, SEQ ID NO:1365, SEQ ID NO:1366, SEQ ID NO:1367, SEQ ID NO:1368, SEQ ID NO:1369, SEQ ID NO:1370, SEQ ID NO:1371, SEQ ID NO:1372, SEQ ID NO:1373, SEQ ID NO:1374, SEQ ID NO:1375, SEQ ID NO:1376, SEQ ID NO:1377, SEQ ID NO:1378, SEQ ID NO:1379, SEQ ID NO:1380, SEQ ID NO:1381, SEQ ID NO:1382, SEQ ID NO:1383, SEQ ID NO:1384, SEQ ID NO:1385, SEQ ID NO:1386, SEQ ID NO:1387, SEQ ID NO:1388, SEQ ID NO:1389, SEQ ID NO:1390, SEQ ID NO:1391, SEQ ID NO:1392, SEQ ID NO:1393, SEQ ID NO:1394, SEQ ID NO:1395, SEQ ID NO:1396, SEQ ID NO:1397, SEQ ID NO:1398, SEQ ID NO:1399, SEQ ID NO:1400, SEQ ID NO:1401, SEQ ID NO:1402, SEQ ID NO:1403, SEQ ID NO:1404, SEQ ID NO:1405, SEQ ID NO:1406, SEQ ID NO:1407, SEQ ID NO:1408, SEQ ID NO:1409, SEQ ID NO:1410, SEQ ID NO:1411, SEQ ID NO:1412, SEQ ID NO:1413, SEQ ID NO:1414, SEQ ID NO:1415, SEQ ID NO:1416, SEQ ID NO:1417, SEQ ID NO:1418, SEQ ID NO:1419, SEQ ID NO:1420, SEQ ID NO:1421, SEQ ID NO:1422, SEQ ID NO:1423, SEQ ID NO:1424, SEQ ID NO:1425, SEQ ID NO:1426, SEQ ID NO:1427, SEQ ID NO:1428, SEQ ID NO:1429, SEQ ID NO:1430, SEQ ID NO:1431, SEQ ID NO:1432, SEQ ID NO:1433, SEQ ID NO:1434, SEQ ID NO:1435, SEQ ID NO:1436, SEQ ID NO:1437, SEQ ID NO:1438, SEQ ID NO:1439, SEQ ID NO:1440, SEQ ID NO:1441, SEQ ID NO:1442, SEQ ID NO:1443, SEQ ID NO:1444, SEQ ID NO:1445, SEQ ID NO:1446, SEQ ID NO:1447, SEQ ID NO:1448, SEQ ID NO:1449, SEQ ID NO:1450, SEQ ID NO:1451, SEQ ID NO:1452, SEQ ID NO:1453, SEQ ID NO:1454, SEQ ID NO:1455, SEQ ID NO:1456, SEQ ID NO:1457, SEQ ID NO:1458, SEQ ID NO:1459, SEQ ID NO:1460, SEQ ID NO:1461, SEQ ID NO:1462, SEQ ID NO:1463, SEQ ID NO:1464, SEQ ID NO:1465, SEQ ID NO:1466, SEQ ID NO:1467, SEQ ID NO:1468, SEQ ID NO:1469, SEQ ID NO:1470, SEQ ID NO:1471, SEQ ID NO:1472, SEQ ID NO:1473, SEQ ID NO:1474, SEQ ID NO:1475, SEQ ID NO:1476, SEQ ID NO:1477, SEQ ID NO:1478, SEQ ID NO:1479, SEQ ID NO:1480, SEQ ID NO:1481, SEQ ID NO:1482, SEQ ID NO:1483, SEQ ID NO:1484, SEQ ID NO:1485, SEQ ID NO:1486, SEQ ID NO:1487, SEQ ID NO:1488, SEQ ID NO:1489, SEQ ID NO:1490, SEQ ID NO:1491, SEQ ID NO:1492, SEQ ID NO:1493, SEQ ID NO:1494, SEQ ID NO:1495, SEQ ID NO:1496, SEQ ID NO:1497, SEQ ID NO:1498, SEQ ID NO:1499, SEQ ID NO:1500, SEQ ID NO:1501, SEQ ID NO:1502, SEQ ID NO:1503, SEQ ID NO:1504, SEQ ID NO:1505, SEQ ID NO:1506, SEQ ID NO:1507, SEQ ID NO:1508, SEQ ID NO:1509, SEQ ID NO:1510, SEQ ID NO:1511, SEQ ID NO:1512, SEQ ID NO:1513, SEQ ID NO:1514, SEQ ID NO:1515, SEQ ID NO:1516, SEQ ID NO:1517, SEQ ID NO:1518, and SEQ ID NO:1519;

[0014] or a complement of said sequence.

[0015] In yet other embodiments, the present invention provides an isolated polynucleotide comprising a nucleotide sequence which hybridizes to a sequence selected from the group consisting of:

[0016] SEQ ID NO:1, SEQ ID NO:2, SEQ ID NO:3, SEQ ID NO:4, SEQ ID NO:5, SEQ ID NO:6, SEQ ID NO:7, SEQ ID NO:8, SEQ ID NO:9, SEQ ID NO:10, SEQ ID NO:11, SEQ ID NO:12, SEQ ID NO:13, SEQ ID NO:14, SEQ ID NO:15, SEQ ID NO:16, SEQ ID NO:17, SEQ ID NO:18, SEQ ID NO:19, SEQ ID NO:20, SEQ ID NO:21, SEQ ID NO:22, SEQ ID NO:23, SEQ ID NO:24, SEQ ID NO:25, SEQ ID NO:26, SEQ ID NO:27, SEQ ID NO:28, SEQ ID NO:29, SEQ ID NO:30, SEQ ID NO:31, SEQ ID NO:32, SEQ ID NO:33, SEQ ID NO:34, SEQ ID NO:35, SEQ ID NO:36, SEQ ID NO:37, SEQ ID NO:38, SEQ ID NO:39, SEQ ID NO:40, SEQ ID NO:41, SEQ ID NO:42, SEQ ID NO:43, SEQ ID NO:44, SEQ ID NO:45, SEQ ID NO:46, SEQ ID NO:47, SEQ ID NO:48, SEQ ID NO:49, SEQ ID NO:50, SEQ ID NO:51, SEQ ID NO:52, SEQ ID NO:53, SEQ ID NO:54, SEQ ID NO:55, SEQ ID NO:56, SEQ ID NO:57, SEQ ID NO:58, SEQ ID NO:59, SEQ ID NO:60, SEQ ID NO:61, SEQ ID NO:62, SEQ ID NO:63, SEQ ID NO:64, SEQ ID NO:65, SEQ ID NO:66, SEQ ID NO:67, SEQ ID NO:68, SEQ ID NO:69, SEQ ID NO:70, SEQ ID NO:71, SEQ ID NO:72, SEQ ID NO:73, SEQ ID NO:74, SEQ ID NO:75, SEQ ID NO:76, SEQ ID NO:77, SEQ ID NO:78, SEQ ID NO:79, SEQ ID NO:80, SEQ ID NO:81, SEQ ID NO:82, SEQ ID NO:83, SEQ ID NO:84, SEQ ID NO:85, SEQ ID NO:86, SEQ ID NO:87, SEQ ID NO:88, SEQ ID NO:89, SEQ ID NO:90, SEQ ID NO:91, SEQ ID NO:92, SEQ ID NO:93, SEQ ID NO:94, SEQ ID NO:95, SEQ ID NO:96, SEQ ID NO:97, SEQ ID NO:98, SEQ ID NO:99, SEQ ID NO:100, SEQ ID NO:101, SEQ ID NO:102, SEQ ID NO:103, SEQ ID NO:104, SEQ ID NO:105, SEQ ID NO:106, SEQ ID NO:107, SEQ ID NO:108, SEQ ID NO:109, SEQ ID NO:110, SEQ ID NO:111, SEQ ID NO:112, SEQ ID NO:113, SEQ ID NO:114, SEQ ID NO:115, SEQ ID NO:116, SEQ ID NO:117, SEQ ID NO:118, SEQ ID NO:119, SEQ ID NO:120, SEQ ID NO:121, SEQ ID NO:122, SEQ ID NO:123, SEQ ID NO:124, SEQ ID NO:125, SEQ ID NO:126, SEQ ID NO:127, SEQ ID NO:128, SEQ ID NO:129, SEQ ID NO:130, SEQ ID NO:131, SEQ ID NO:132, SEQ ID NO:133, SEQ ID NO:134, SEQ ID NO:135, SEQ ID NO:136, SEQ ID NO:137, SEQ ID NO:138, SEQ ID NO:139, SEQ ID NO:140, SEQ ID NO:141, SEQ ID NO:142, SEQ ID NO:143, SEQ ID NO:144, SEQ ID NO:145, SEQ ID NO:146, SEQ ID NO:147, SEQ ID NO:148, SEQ ID NO:149, SEQ ID NO:150, SEQ ID NO:151, SEQ ID NO:152, SEQ ID NO:153, SEQ ID NO:154, SEQ ID NO:155, SEQ ID NO:156, SEQ ID NO:157, SEQ ID NO:158, SEQ ID NO:159, SEQ ID NO:160, SEQ ID NO:161, SEQ ID NO:162, SEQ ID NO:163, SEQ ID NO:164, SEQ ID NO:165, SEQ ID NO:166, SEQ ID NO:167, SEQ ID NO:168, SEQ ID NO:169, SEQ ID NO:170, SEQ ID NO:171, SEQ ID NO:172, SEQ ID NO:173, SEQ ID NO:174, SEQ ID NO:175, SEQ ID NO:176, SEQ ID NO:177, SEQ ID NO:178, SEQ ID NO:179, SEQ ID NO:180, SEQ ID NO:181, SEQ ID NO:182, SEQ ID NO:183, SEQ ID NO:184, SEQ ID NO:185, SEQ ID NO:186, SEQ ID NO:187, SEQ ID NO:188, SEQ ID NO:189, SEQ ID NO:190, SEQ ID NO:191, SEQ ID NO:192, SEQ ID NO:193, SEQ ID NO:194, SEQ ID NO:195, SEQ ID NO:196, SEQ ID NO:197, SEQ ID NO:198, SEQ ID NO:199, SEQ ID NO:200, SEQ ID NO:201, SEQ ID NO:202, SEQ ID NO:203, SEQ ID NO:204, SEQ ID NO:205, SEQ ID NO:206, SEQ ID NO:207, SEQ ID NO:208, SEQ ID NO:209, SEQ ID NO:210, SEQ ID NO:211, SEQ ID NO:212, SEQ ID NO:213, SEQ ID NO:214, SEQ ID NO:215, SEQ ID NO:216, SEQ ID NO:217, SEQ ID NO:218, SEQ ID NO:219, SEQ ID NO:220, SEQ ID NO:221, SEQ ID NO:222, SEQ ID NO:223, SEQ ID NO:224, SEQ ID NO:225, SEQ ID NO:226, SEQ ID NO:227, SEQ ID NO:228, SEQ ID NO:229, SEQ ID NO:230, SEQ ID NO:231, SEQ ID NO:232, SEQ ID NO:233, SEQ ID NO:234, SEQ ID NO:235, SEQ ID NO:236, SEQ ID NO:237, SEQ ID NO:238, SEQ ID NO:239, SEQ ID NO:240, SEQ ID NO:241, SEQ ID NO:242, SEQ ID NO:243, SEQ ID NO:244, SEQ ID NO:245, SEQ ID NO:246, SEQ ID NO:247, SEQ ID NO:248, SEQ ID NO:249, SEQ ID NO:250, SEQ ID NO:251, SEQ ID NO:252, SEQ ID NO:253, SEQ ID NO:254, SEQ ID NO:255, SEQ ID NO:256, SEQ ID NO:257, SEQ ID NO:258, SEQ ID NO:259, SEQ ID NO:260, SEQ ID NO:261, SEQ ID NO:262, SEQ ID NO:263, SEQ ID NO:264, SEQ ID NO:265, SEQ ID NO:266, SEQ ID NO:267, SEQ ID NO:268, SEQ ID NO:269, SEQ ID NO:270, SEQ ID NO:271, SEQ ID NO:272, SEQ ID NO:273, SEQ ID NO:274, SEQ ID NO:275, SEQ ID NO:276, SEQ ID NO:277, SEQ ID NO:278, SEQ ID NO:279, SEQ ID NO:280, SEQ ID NO:281, SEQ ID NO:282, SEQ ID NO:283, SEQ ID NO:284, SEQ ID NO:285, SEQ ID NO:286, SEQ ID NO:287, SEQ ID NO:288, SEQ ID NO:289, SEQ ID NO:290, SEQ ID NO:291, SEQ ID NO:292, SEQ ID NO:293, SEQ ID NO:294, SEQ ID NO:295, SEQ ID NO:296, SEQ ID NO:297, SEQ ID NO:298, SEQ ID NO:299, SEQ ID NO:300, SEQ ID NO:301, SEQ ID NO:302, SEQ ID NO:303, SEQ ID NO:304, SEQ ID NO:305, SEQ ID NO:306, SEQ ID NO:307, SEQ ID NO:308, SEQ ID NO:309, SEQ ID NO:310, SEQ ID NO:311, SEQ ID NO:312, SEQ ID NO:313, SEQ ID NO:314, SEQ ID NO:315, SEQ ID NO:316, SEQ ID NO:317, SEQ ID NO:318, SEQ ID NO:319, SEQ ID NO:320, SEQ ID NO:321, SEQ ID NO:322, SEQ ID NO:323, SEQ ID NO:324, SEQ ID NO:325, SEQ ID NO:326, SEQ ID NO:327, SEQ ID NO:328, SEQ ID NO:329, SEQ ID NO:330, SEQ ID NO:331, SEQ ID NO:332, SEQ ID NO:333, SEQ ID NO:334, SEQ ID NO:335, SEQ ID NO:336, SEQ ID NO:337, SEQ ID NO:338, SEQ ID NO:339, SEQ ID NO:340, SEQ ID NO:341, SEQ ID NO:342, SEQ ID NO:343, SEQ ID NO:344, SEQ ID NO:345, SEQ ID NO:346, SEQ ID NO:347, SEQ ID NO:348, SEQ ID NO:349, SEQ ID NO:350, SEQ ID NO:351, SEQ ID NO:352, SEQ ID NO:353, SEQ ID NO:354, SEQ ID NO:355, SEQ ID NO:356, SEQ ID NO:357, SEQ ID NO:358, SEQ ID NO:359, SEQ ID NO:360, SEQ ID NO:361, SEQ ID NO:362, SEQ ID NO:363, SEQ ID NO:364, SEQ ID NO:365, SEQ ID NO:366, SEQ ID NO:367, SEQ ID NO:368, SEQ ID NO:369, SEQ ID NO:370, SEQ ID NO:371, SEQ ID NO:372, SEQ ID NO:373, SEQ ID NO:374, SEQ ID NO:375, SEQ ID NO:376, SEQ ID NO:377, SEQ ID NO:378, SEQ ID NO:379, SEQ ID NO:380, SEQ ID NO:381, SEQ ID NO:382, SEQ ID NO:383, SEQ ID NO:384, SEQ ID NO:385, SEQ ID NO:386, SEQ ID NO:387, SEQ ID NO:388, SEQ ID NO:389, SEQ ID NO:390, SEQ ID NO:391, SEQ ID NO:392, SEQ ID NO:393, SEQ ID NO:394, SEQ ID NO:395, SEQ ID NO:396, SEQ ID NO:397, SEQ ID NO:398, SEQ ID NO:399, SEQ ID NO:400, SEQ ID NO:401, SEQ ID NO:402, SEQ ID NO:403, SEQ ID NO:404, SEQ ID NO:405, SEQ ID NO:406, SEQ ID NO:407, SEQ ID NO:408, SEQ ID NO:409, SEQ ID NO:410, SEQ ID NO:411, SEQ ID NO:412, SEQ ID NO:413, SEQ ID NO:414, SEQ ID NO:415, SEQ ID NO:416, SEQ ID NO:417, SEQ ID NO:418, SEQ ID NO:419, SEQ ID NO:420, SEQ ID NO:421, SEQ ID NO:422, SEQ ID NO:423, SEQ ID NO:424, SEQ ID NO:425, SEQ ID NO:426, SEQ ID NO:427, SEQ ID NO:428, SEQ ID NO:429, SEQ ID NO:430, SEQ ID NO:431, SEQ ID NO:432, SEQ ID NO:433, SEQ ID NO:434, SEQ ID NO:435, SEQ ID NO:436, SEQ ID NO:437, SEQ ID NO:438, SEQ ID NO:439, SEQ ID NO:440, SEQ ID NO:441, SEQ ID NO:442, SEQ ID NO:443, SEQ ID NO:444, SEQ ID NO:445, SEQ ID NO:446, SEQ ID NO:447, SEQ ID NO:448, SEQ ID NO:449, SEQ ID NO:450, SEQ ID NO:451, SEQ ID NO:452, SEQ ID NO:453, SEQ ID NO:454, SEQ ID NO:455, SEQ ID NO:456, SEQ ID NO:457, SEQ ID NO:458, SEQ ID NO:459, SEQ ID NO:460, SEQ ID NO:461, SEQ ID NO:462, SEQ ID NO:463, SEQ ID NO:464, SEQ ID NO:465, SEQ ID NO:466, SEQ ID NO:467, SEQ ID NO:468, SEQ ID NO:469, SEQ ID NO:470, SEQ ID NO:471, SEQ ID NO:472, SEQ ID NO:473, SEQ ID NO:474, SEQ ID NO:475, SEQ ID NO:476, SEQ ID NO:477, SEQ ID NO:478, SEQ ID NO:479, SEQ ID NO:480, SEQ ID NO:481, SEQ ID NO:482, SEQ ID NO:483, SEQ ID NO:484, SEQ ID NO:485, SEQ ID NO:486, SEQ ID NO:487, SEQ ID NO:488, SEQ ID NO:489, SEQ ID NO:490, SEQ ID NO:491, SEQ ID NO:492, SEQ ID NO:493, SEQ ID NO:494, SEQ ID NO:495, SEQ ID NO:496, SEQ ID NO:497, SEQ ID NO:498, SEQ ID NO:499, SEQ ID NO:500, SEQ ID NO:501, SEQ ID NO:502, SEQ ID NO:503, SEQ ID NO:504, SEQ ID NO:505, SEQ ID NO:506, SEQ ID NO:507, SEQ ID NO:508, SEQ ID NO:509, SEQ ID NO:510, SEQ ID NO:511, SEQ ID NO:512, SEQ ID NO:513, SEQ ID NO:514, SEQ ID NO:515, SEQ ID NO:516, SEQ ID NO:517, SEQ ID NO:518, SEQ ID NO:519, SEQ ID NO:520, SEQ ID NO:521, SEQ ID NO:522, SEQ ID NO:523, SEQ ID NO:524, SEQ ID NO:525, SEQ ID NO:526, SEQ ID NO:527, SEQ ID NO:528, SEQ ID NO:529, SEQ ID NO:530, SEQ ID NO:531, SEQ ID NO:532, SEQ ID NO:533, SEQ ID NO:534, SEQ ID NO:535, SEQ ID NO:536, SEQ ID NO:537, SEQ ID NO:538, SEQ ID NO:539, SEQ ID NO:540, SEQ ID NO:541, SEQ ID NO:542, SEQ ID NO:543, SEQ ID NO:544, SEQ ID NO:545, SEQ ID NO:546, SEQ ID NO:547, SEQ ID NO:548, SEQ ID NO:549, SEQ ID NO:550, SEQ ID NO:551, SEQ ID NO:552, SEQ ID NO:553, SEQ ID NO:554, SEQ ID NO:555, SEQ ID NO:556, SEQ ID NO:557, SEQ ID NO:558, SEQ ID NO:559, SEQ ID NO:560, SEQ ID NO:561, SEQ ID NO:562, SEQ ID NO:563, SEQ ID NO:564, SEQ ID NO:565, SEQ ID NO:566, SEQ ID NO:567, SEQ ID NO:568, SEQ ID NO:569, SEQ ID NO:570, SEQ ID NO:571, SEQ ID NO:572, SEQ ID NO:573, SEQ ID NO:574, SEQ ID NO:575, SEQ ID NO:576, SEQ ID NO:577, SEQ ID NO:578, SEQ ID NO:579, SEQ ID NO:580, SEQ ID NO:581, SEQ ID NO:582, SEQ ID NO:583, SEQ ID NO:584, SEQ ID NO:585, SEQ ID NO:586, SEQ ID NO:587, SEQ ID NO:588, SEQ ID NO:589, SEQ ID NO:590, SEQ ID NO:591, SEQ ID NO:592, SEQ ID NO:593, SEQ ID NO:594, SEQ ID NO:595, SEQ ID NO:596, SEQ ID NO:597, SEQ ID NO:598, SEQ ID NO:599, SEQ ID NO:600, SEQ ID NO:601, SEQ ID NO:602, SEQ ID NO:603, SEQ ID NO:604, SEQ ID NO:605, SEQ ID NO:606, SEQ ID NO:607, SEQ ID NO:608, SEQ ID NO:609, SEQ ID NO:610, SEQ ID NO:611, SEQ ID NO:612, SEQ ID NO:613, SEQ ID NO:614, SEQ ID NO:615, SEQ ID NO:616, SEQ ID NO:617, SEQ ID NO:618, SEQ ID NO:619, SEQ ID NO:620, SEQ ID NO:621, SEQ ID NO:622, SEQ ID NO:623, SEQ ID NO:624, SEQ ID NO:625, SEQ ID NO:626, SEQ ID NO:627, SEQ ID NO:628, SEQ ID NO:629, SEQ ID NO:630, SEQ ID NO:631, SEQ ID NO:632, SEQ ID NO:633, SEQ ID NO:634, SEQ ID NO:635, SEQ ID NO:636, SEQ ID NO:637, SEQ ID NO:638, SEQ ID NO:639, SEQ ID NO:640, SEQ ID NO:641, SEQ ID NO:642, SEQ ID NO:643, SEQ ID NO:644, SEQ ID NO:645, SEQ ID NO:646, SEQ ID NO:647, SEQ ID NO:648, SEQ ID NO:649, SEQ ID NO:650, SEQ ID NO:651, SEQ ID NO:652, SEQ ID NO:653, SEQ ID NO:654, SEQ ID NO:655, SEQ ID NO:656, SEQ ID NO:657, SEQ ID NO:658, SEQ ID NO:659, SEQ ID NO:660, SEQ ID NO:661, SEQ ID NO:662, SEQ ID NO:663, SEQ ID NO:664, SEQ ID NO:665, SEQ ID NO:666, SEQ ID NO:667, SEQ ID NO:668, SEQ ID NO:669, SEQ ID NO:670, SEQ ID NO:671, SEQ ID NO:672, SEQ ID NO:673, SEQ ID NO:674, SEQ ID NO:675, SEQ ID NO:676, SEQ ID NO:677, SEQ ID NO:678, SEQ ID NO:679, SEQ ID NO:680, SEQ ID NO:681, SEQ ID NO:682, SEQ ID NO:683, SEQ ID NO:684, SEQ ID NO:685, SEQ ID NO:686, SEQ ID NO:687, SEQ ID NO:688, SEQ ID NO:689, SEQ ID NO:690, SEQ ID NO:691, SEQ ID NO:692, SEQ ID NO:693, SEQ ID NO:694, SEQ ID NO:695, SEQ ID NO:696, SEQ ID NO:697, SEQ ID NO:698, SEQ ID NO:699, SEQ ID NO:700, SEQ ID NO:701, SEQ ID NO:702, SEQ ID NO:703, SEQ ID NO:704, SEQ ID NO:705, SEQ ID NO:706, SEQ ID NO:707, SEQ ID NO:708, SEQ ID NO:709, SEQ ID NO:710, SEQ ID NO:711, SEQ ID NO:712, SEQ ID NO:713, SEQ ID NO:714, SEQ ID NO:715, SEQ ID NO:716, SEQ ID NO:717, SEQ ID NO:718, SEQ ID NO:719, SEQ ID NO:720, SEQ ID NO:721, SEQ ID NO:722, SEQ ID NO:723, SEQ ID NO:724, SEQ ID NO:725, SEQ ID NO:726, SEQ ID NO:727, SEQ ID NO:728, SEQ ID NO:729, SEQ ID NO:730, SEQ ID NO:731, SEQ ID NO:732, SEQ ID NO:733, SEQ ID NO:734, SEQ ID NO:735, SEQ ID NO:736, SEQ ID NO:737, SEQ ID NO:738, SEQ ID NO:739, SEQ ID NO:740, SEQ ID NO:741, SEQ ID NO:742, SEQ ID NO:743, SEQ ID NO:744, SEQ ID NO:745, SEQ ID NO:746, SEQ ID NO:747, SEQ ID NO:748, SEQ ID NO:749, SEQ ID NO:750, SEQ ID NO:751, SEQ ID NO:752, SEQ ID NO:753, SEQ ID NO:754, SEQ ID NO:755, SEQ ID NO:756, SEQ ID NO:757, SEQ ID NO:758, SEQ ID NO:759, SEQ ID NO:760, SEQ ID NO:761, SEQ ID NO:762, SEQ ID NO:763, SEQ ID NO:764, SEQ ID NO:765, SEQ ID NO:766, SEQ ID NO:767, SEQ ID NO:768, SEQ ID NO:769, SEQ ID NO:770, SEQ ID NO:771, SEQ ID NO:772, SEQ ID NO:773, SEQ ID NO:774, SEQ ID NO:775, SEQ ID NO:776, SEQ ID NO:777, SEQ ID NO:778, SEQ ID NO:779, SEQ ID NO:780, SEQ ID NO:781, SEQ ID NO:782, SEQ ID NO:783, SEQ ID NO:784, SEQ ID NO:785, SEQ ID NO:786, SEQ ID NO:787, SEQ ID NO:788, SEQ ID NO:789, SEQ ID NO:790, SEQ ID NO:791, SEQ ID NO:792, SEQ ID NO:793, SEQ ID NO:794, SEQ ID NO:795, SEQ ID NO:796, SEQ ID NO:797, SEQ ID NO:798, SEQ ID NO:799, SEQ ID NO:800, SEQ ID NO:801, SEQ ID NO:802, SEQ ID NO:803, SEQ ID NO:804, SEQ ID NO:805, SEQ ID NO:806, SEQ ID NO:807, SEQ ID NO:808, SEQ ID NO:809, SEQ ID NO:810, SEQ ID NO:811, SEQ ID NO:812, SEQ ID NO:813, SEQ ID NO:814, SEQ ID NO:815, SEQ ID NO:816, SEQ ID NO:817, SEQ ID NO:818, SEQ ID NO:819, SEQ ID NO:820, SEQ ID NO:821, SEQ ID NO:822, SEQ ID NO:823, SEQ ID NO:824, SEQ ID NO:825, SEQ ID NO:826, SEQ ID NO:827, SEQ ID NO:828, SEQ ID NO:829, SEQ ID NO:830, SEQ ID NO:831, SEQ ID NO:832, SEQ ID NO:833, SEQ ID NO:834, SEQ ID NO:835, SEQ ID NO:836, SEQ ID NO:837, SEQ ID NO:838, SEQ ID NO:839, SEQ ID NO:840, SEQ ID NO:841, SEQ ID NO:842, SEQ ID NO:843, SEQ ID NO:844, SEQ ID NO:845, SEQ ID NO:846, SEQ ID NO:847, SEQ ID NO:848, SEQ ID NO:849, SEQ ID NO:850, SEQ ID NO:851, SEQ ID NO:852, SEQ ID NO:853, SEQ ID NO:854, SEQ ID NO:855, SEQ ID NO:856, SEQ ID NO:857, SEQ ID NO:858, SEQ ID NO:859, SEQ ID NO:860, SEQ ID NO:861, SEQ ID NO:862, SEQ ID NO:863, SEQ ID NO:864, SEQ ID NO:865, SEQ ID NO:866, SEQ ID NO:867, SEQ ID NO:868, SEQ ID NO:869, SEQ ID NO:870, SEQ ID NO:871, SEQ ID NO:872, SEQ ID NO:873, SEQ ID NO:874, SEQ ID NO:875, SEQ ID NO:876, SEQ ID NO:877, SEQ ID NO:878, SEQ ID NO:879, SEQ ID NO:880, SEQ ID NO:881, SEQ ID NO:882, SEQ ID NO:883, SEQ ID NO:884, SEQ ID NO:885, SEQ ID NO:886, SEQ ID NO:887, SEQ ID NO:888, SEQ ID NO:889, SEQ ID NO:890, SEQ ID NO:891, SEQ ID NO:892, SEQ ID NO:893, SEQ ID NO:894, SEQ ID NO:895, SEQ ID NO:896, SEQ ID NO:897, SEQ ID NO:898, SEQ ID NO:899, SEQ ID NO:900, SEQ ID NO:901, SEQ ID NO:902, SEQ ID NO:903, SEQ ID NO:904, SEQ ID NO:905, SEQ ID NO:906, SEQ ID NO:907, SEQ ID NO:908, SEQ ID NO:909, SEQ ID NO:910, SEQ ID NO:911, SEQ ID NO:912, SEQ ID NO:913, SEQ ID NO:914, SEQ ID NO:915, SEQ ID NO:916, SEQ ID NO:917, SEQ ID NO:918, SEQ ID NO:919, SEQ ID NO:920, SEQ ID NO:921, SEQ ID NO:922, SEQ ID NO:923, SEQ ID NO:924, SEQ ID NO:925, SEQ ID NO:926, SEQ ID NO:927, SEQ ID NO:928, SEQ ID NO:929, SEQ ID NO:930, SEQ ID NO:931, SEQ ID NO:932, SEQ ID NO:933, SEQ ID NO:934, SEQ ID NO:935, SEQ ID NO:936, SEQ ID NO:937, SEQ ID NO:938, SEQ ID NO:939, SEQ ID NO:940, SEQ ID NO:941, SEQ ID NO:942, SEQ ID NO:943, SEQ ID NO:944, SEQ ID NO:945, SEQ ID NO:946, SEQ ID NO:947, SEQ ID NO:948, SEQ ID NO:949, SEQ ID NO:950, SEQ ID NO:951, SEQ ID NO:952, SEQ ID NO:953, SEQ ID NO:954, SEQ ID NO:955, SEQ ID NO:956, SEQ ID NO:957, SEQ ID NO:958, SEQ ID NO:959, SEQ ID NO:960, SEQ ID NO:961, SEQ ID NO:962, SEQ ID NO:963, SEQ ID NO:964, SEQ ID NO:965, SEQ ID NO:966, SEQ ID NO:967, SEQ ID NO:968, SEQ ID NO:969, SEQ ID NO:970, SEQ ID NO:971, SEQ ID NO:972, SEQ ID NO:973, SEQ ID NO:974, SEQ ID NO:975, SEQ ID NO:976, SEQ ID NO:977, SEQ ID NO:978, SEQ ID NO:979, SEQ ID NO:980, SEQ ID NO:981, SEQ ID NO:982, SEQ ID NO:983, SEQ ID NO:984, SEQ ID NO:985, SEQ ID NO:986, SEQ ID NO:987, SEQ ID NO:988, SEQ ID NO:989, SEQ ID NO:990, SEQ ID NO:991, SEQ ID NO:992, SEQ ID NO:993, SEQ ID NO:994, SEQ ID NO:995, SEQ ID NO:996, SEQ ID NO:997, SEQ ID NO:998, SEQ ID NO:999, SEQ ID NO:1000, SEQ ID NO:1001, SEQ ID NO:1002, SEQ ID NO:1003, SEQ ID NO:1004, SEQ ID NO:1005, SEQ ID NO:1006, SEQ ID NO:1007, SEQ ID NO:1008, SEQ ID NO:1009, SEQ ID NO:1010, SEQ ID NO:1011, SEQ ID NO:1012, SEQ ID NO:1013, SEQ ID NO:1014, SEQ ID NO:1015, SEQ ID NO:1016, SEQ ID NO:1017, SEQ ID NO:1018, SEQ ID NO:1019, SEQ ID NO:1020, SEQ ID NO:1021, SEQ ID NO:1022, SEQ ID NO:1023, SEQ ID NO:1024, SEQ ID NO:1025, SEQ ID NO:1026, SEQ ID NO:1027, SEQ ID NO:1028, SEQ ID NO:1029, SEQ ID NO:1030, SEQ ID NO:1031, SEQ ID NO:1032, SEQ ID NO:1033, SEQ ID NO:1034, SEQ ID NO:1035, SEQ ID NO:1036, SEQ ID NO:1037, SEQ ID NO:1038, SEQ ID NO:1039, SEQ ID NO:1040, SEQ ID NO:1041, SEQ ID NO:1042, SEQ ID NO:1043, SEQ ID NO:1044, SEQ ID NO:1045, SEQ ID NO:1046, SEQ ID NO:1047, SEQ ID NO:1048, SEQ ID NO:1049, SEQ ID NO:1050, SEQ ID NO:1051, SEQ ID NO:1052, SEQ ID NO:1053, SEQ ID NO:1054, SEQ ID NO:1055, SEQ ID NO:1056, SEQ ID NO:1057, SEQ ID NO:1058, SEQ ID NO:1059, SEQ ID NO:1060, SEQ ID NO:1061, SEQ ID NO:1062, SEQ ID NO:1063, SEQ ID NO:1064, SEQ ID NO:1065, SEQ ID NO:1066, SEQ ID NO:1067, SEQ ID NO:1068, SEQ ID NO:1069, SEQ ID NO:1070, SEQ ID NO:1071, SEQ ID NO:1072, SEQ ID NO:1073, SEQ ID NO:1074, SEQ ID NO:1075, SEQ ID NO:1076, SEQ ID NO:1077, SEQ ID NO:1078, SEQ ID NO:1079, SEQ ID NO:1080, SEQ ID NO:1081, SEQ ID NO:1082, SEQ ID NO:1083, SEQ ID NO:1084, SEQ ID NO:1085, SEQ ID NO:1086, SEQ ID NO:1087, SEQ ID NO:1088, SEQ ID NO:1089, SEQ ID NO:1090, SEQ ID NO:1091, SEQ ID NO:1092, SEQ ID NO:1093, SEQ ID NO:1094, SEQ ID NO:1095, SEQ ID NO:1096, SEQ ID NO:1097, SEQ ID NO:1098, SEQ ID NO:1099, SEQ ID NO:1100, SEQ ID NO:1101, SEQ ID NO:1102, SEQ ID NO:1103, SEQ ID NO:1104, SEQ ID NO:1105, SEQ ID NO:1106, SEQ ID NO:1107, SEQ ID NO:1108, SEQ ID NO:1109, SEQ ID NO:1110, SEQ ID NO:1111, SEQ ID NO:1112, SEQ ID NO:1113, SEQ ID NO:1114, SEQ ID NO:1115, SEQ ID NO:1116, SEQ ID NO:1117, SEQ ID NO:1118, SEQ ID NO:1119, SEQ ID NO:1120, SEQ ID NO:1121, SEQ ID NO:1122, SEQ ID NO:1123, SEQ ID NO:1124, SEQ ID NO:1125, SEQ ID NO:1126, SEQ ID NO:1127, SEQ ID NO:1128, SEQ ID NO:1129, SEQ ID NO:1130, SEQ ID NO:1131, SEQ ID NO:1132, SEQ ID NO:1133, SEQ ID NO:1134, SEQ ID NO:1135, SEQ ID NO:1136, SEQ ID NO:1137, SEQ ID NO:1138, SEQ ID NO:1139, SEQ ID NO:1140, SEQ ID NO:1141, SEQ ID NO:1142, SEQ ID NO:1143, SEQ ID NO:1144, SEQ ID NO:1145, SEQ ID NO:1146, SEQ ID NO:1147, SEQ ID NO:1148, SEQ ID NO:1149, SEQ ID NO:1150, SEQ ID NO:1151, SEQ ID NO:1152, SEQ ID NO:1153, SEQ ID NO:1154, SEQ ID NO:1155, SEQ ID NO:1156, SEQ ID NO:1157, SEQ ID NO:1158, SEQ ID NO:1159, SEQ ID NO:1160, SEQ ID NO:1161, SEQ ID NO:1162, SEQ ID NO:1163, SEQ ID NO:1164, SEQ ID NO:1165, SEQ ID NO:1166, SEQ ID NO:1167, SEQ ID NO:1168, SEQ ID NO:1169, SEQ ID NO:1170, SEQ ID NO:1171, SEQ ID NO:1172, SEQ ID NO:1173, SEQ ID NO:1174, SEQ ID NO:1175, SEQ ID NO:1176, SEQ ID NO:1177, SEQ ID NO:1178, SEQ ID NO:1179, SEQ ID NO:1180, SEQ ID NO:1181, SEQ ID NO:1182, SEQ ID NO:1183, SEQ ID NO:1184, SEQ ID NO:1185, SEQ ID NO:1186, SEQ ID NO:1187, SEQ ID NO:1188, SEQ ID NO:1189, SEQ ID NO:1190, SEQ ID NO:1191, SEQ ID NO:1192, SEQ ID NO:1193, SEQ ID NO:1194, SEQ ID NO:1195, SEQ ID NO:1196, SEQ ID NO:1197, SEQ ID NO:1198, SEQ ID NO:1199, SEQ ID NO:1200, SEQ ID NO:1201, SEQ ID NO:1202, SEQ ID NO:1203, SEQ ID NO:1204, SEQ ID NO:1205, SEQ ID NO:1206, SEQ ID NO:1207, SEQ ID NO:1208, SEQ ID NO:1209, SEQ ID NO:1210, SEQ ID NO:1211, SEQ ID NO:1212, SEQ ID NO:1213, SEQ ID NO:1214, SEQ ID NO:1215, SEQ ID NO:1216, SEQ ID NO:1217, SEQ ID NO:1218, SEQ ID NO:1219, SEQ ID NO:1220, SEQ ID NO:1221, SEQ ID NO:1222, SEQ ID NO:1223, SEQ ID NO:1224, SEQ ID NO:1225, SEQ ID NO:1226, SEQ ID NO:1227, SEQ ID NO:1228, SEQ ID NO:1229, SEQ ID NO:1230, SEQ ID NO:1231, SEQ ID NO:1232, SEQ ID NO:1233, SEQ ID NO:1234, SEQ ID NO:1235, SEQ ID NO:1236, SEQ ID NO:1237, SEQ ID NO:1238, SEQ ID NO:1239, SEQ ID NO:1240, SEQ ID NO:1241, SEQ ID NO:1242, SEQ ID NO:1243, SEQ ID NO:1244, SEQ ID NO:1245, SEQ ID NO:1246, SEQ ID NO:1247, SEQ ID NO:1248, SEQ ID NO:1249, SEQ ID NO:1250, SEQ ID NO:1251, SEQ ID NO:1252, SEQ ID NO:1253, SEQ ID NO:1254, SEQ ID NO:1255, SEQ ID NO:1256, SEQ ID NO:1257, SEQ ID NO:1258, SEQ ID NO:1259, SEQ ID NO:1260, SEQ ID NO:1261, SEQ ID NO:1262, SEQ ID NO:1263, SEQ ID NO:1264, SEQ ID NO:1265, SEQ ID NO:1266, SEQ ID NO:1267, SEQ ID NO:1268, SEQ ID NO:1269, SEQ ID NO:1270, SEQ ID NO:1271, SEQ ID NO:1272, SEQ ID NO:1273, SEQ ID NO:1274, SEQ ID NO:1275, SEQ ID NO:1276, SEQ ID NO:1277, SEQ ID NO:1278, SEQ ID NO:1279, SEQ ID NO:1280, SEQ ID NO:1281, SEQ ID NO:1282, SEQ ID NO:1283, SEQ ID NO:1284, SEQ ID NO:1285, SEQ ID NO:1286, SEQ ID NO:1287, SEQ ID NO:1288, SEQ ID NO:1289, SEQ ID NO:1290, SEQ ID NO:1291, SEQ ID NO:1292, SEQ ID NO:1293, SEQ ID NO:1294, SEQ ID NO:1295, SEQ ID NO:1296, SEQ ID NO:1297, SEQ ID NO:1298, SEQ ID NO:1299, SEQ ID NO:1300, SEQ ID NO:1301, SEQ ID NO:1302, SEQ ID NO:1303, SEQ ID NO:1304, SEQ ID NO:1305, SEQ ID NO:1306, SEQ ID NO:1307, SEQ ID NO:1308, SEQ ID NO:1309, SEQ ID NO:1310, SEQ ID NO:1311, SEQ ID NO:1312, SEQ ID NO:1313, SEQ ID NO:1314, SEQ ID NO:1315, SEQ ID NO:1316, SEQ ID NO:1317, SEQ ID NO:1318, SEQ ID NO:1319, SEQ ID NO:1320, SEQ ID NO:1321, SEQ ID NO:1322, SEQ ID NO:1323, SEQ ID NO:1324, SEQ ID NO:1325, SEQ ID NO:1326, SEQ ID NO:1327, SEQ ID NO:1328, SEQ ID NO:1329, SEQ ID NO:1330, SEQ ID NO:1331, SEQ ID NO:1332, SEQ ID NO:1333, SEQ ID NO:1334, SEQ ID NO:1335, SEQ ID NO:1336, SEQ ID NO:1337, SEQ ID NO:1338, SEQ ID NO:1339, SEQ ID NO:1340, SEQ ID NO:1341, SEQ ID NO:1342, SEQ ID NO:1343, SEQ ID NO:1344, SEQ ID NO:1345, SEQ ID NO:1346, SEQ ID NO:1347, SEQ ID NO:1348, SEQ ID NO:1349, SEQ ID NO:1350, SEQ ID NO:1351, SEQ ID NO:1352, SEQ ID NO:1353, SEQ ID NO:1354, SEQ ID NO:1355, SEQ ID NO:1356, SEQ ID NO:1357, SEQ ID NO:1358, SEQ ID NO:1359, SEQ ID NO:1360, SEQ ID NO:1361, SEQ ID NO:1362, SEQ ID NO:1363, SEQ ID NO:1364, SEQ ID NO:1365, SEQ ID NO:1366, SEQ ID NO:1367, SEQ ID NO:1368, SEQ ID NO:1369, SEQ ID NO:1370, SEQ ID NO:1371, SEQ ID NO:1372, SEQ ID NO:1373, SEQ ID NO:1374, SEQ ID NO:1375, SEQ ID NO:1376, SEQ ID NO:1377, SEQ ID NO:1378, SEQ ID NO:1379, SEQ ID NO:1380, SEQ ID NO:1381, SEQ ID NO:1382, SEQ ID NO:1383, SEQ ID NO:1384, SEQ ID NO:1385, SEQ ID NO:1386, SEQ ID NO:1387, SEQ ID NO:1388, SEQ ID NO:1389, SEQ ID NO:1390, SEQ ID NO:1391, SEQ ID NO:1392, SEQ ID NO:1393, SEQ ID NO:1394, SEQ ID NO:1395, SEQ ID NO:1396, SEQ ID NO:1397, SEQ ID NO:1398, SEQ ID NO:1399, SEQ ID NO:1400, SEQ ID NO:1401, SEQ ID NO:1402, SEQ ID NO:1403, SEQ ID NO:1404, SEQ ID NO:1405, SEQ ID NO:1406, SEQ ID NO:1407, SEQ ID NO:1408, SEQ ID NO:1409, SEQ ID NO:1410, SEQ ID NO:1411, SEQ ID NO:1412, SEQ ID NO:1413, SEQ ID NO:1414, SEQ ID NO:1415, SEQ ID NO:1416, SEQ ID NO:1417, SEQ ID NO:1418, SEQ ID NO:1419, SEQ ID NO:1420, SEQ ID NO:1421, SEQ ID NO:1422, SEQ ID NO:1423, SEQ ID NO:1424, SEQ ID NO:1425, SEQ ID NO:1426, SEQ ID NO:1427, SEQ ID NO:1428, SEQ ID NO:1429, SEQ ID NO:1430, SEQ ID NO:1431, SEQ ID NO:1432, SEQ ID NO:1433, SEQ ID NO:1434, SEQ ID NO:1435, SEQ ID NO:1436, SEQ ID NO:1437, SEQ ID NO:1438, SEQ ID NO:1439, SEQ ID NO:1440, SEQ ID NO:1441, SEQ ID NO:1442, SEQ ID NO:1443, SEQ ID NO:1444, SEQ ID NO:1445, SEQ ID NO:1446, SEQ ID NO:1447, SEQ ID NO:1448, SEQ ID NO:1449, SEQ ID NO:1450, SEQ ID NO:1451, SEQ ID NO:1452, SEQ ID NO:1453, SEQ ID NO:1454, SEQ ID NO:1455, SEQ ID NO:1456, SEQ ID NO:1457, SEQ ID NO:1458, SEQ ID NO:1459, SEQ ID NO:1460, SEQ ID NO:1461, SEQ ID NO:1462, SEQ ID NO:1463, SEQ ID NO:1464, SEQ ID NO:1465, SEQ ID NO:1466, SEQ ID NO:1467, SEQ ID NO:1468, SEQ ID NO:1469, SEQ ID NO:1470, SEQ ID NO:1471, SEQ ID NO:1472, SEQ ID NO:1473, SEQ ID NO:1474, SEQ ID NO:1475, SEQ ID NO:1476, SEQ ID NO:1477, SEQ ID NO:1478, SEQ ID NO:1479, SEQ ID NO:1480, SEQ ID NO:1481, SEQ ID NO:1482, SEQ ID NO:1483, SEQ ID NO:1484, SEQ ID NO:1485, SEQ ID NO:1486, SEQ ID NO:1487, SEQ ID NO:1488, SEQ ID NO:1489, SEQ ID NO:1490, SEQ ID NO:1491, SEQ ID NO:1492, SEQ ID NO:1493, SEQ ID NO:1494, SEQ ID NO:1495, SEQ ID NO:1496, SEQ ID NO:1497, SEQ ID NO:1498, SEQ ID NO:1499, SEQ ID NO:1500, SEQ ID NO:1501, SEQ ID NO:1502, SEQ ID NO:1503, SEQ ID NO:1504, SEQ ID NO:1505, SEQ ID NO:1506, SEQ ID NO:1507, SEQ ID NO:1508, SEQ ID NO:1509, SEQ ID NO:1510, SEQ ID NO:1511, SEQ ID NO:1512, SEQ ID NO:1513, SEQ ID NO:1514, SEQ ID NO:1515, SEQ ID NO:1516, SEQ ID NO:1517, SEQ ID NO:1518, and SEQ ID NO:1519;

[0017] or to a complement of said sequence.

[0018] The invention also provides for proteins encoded by the above-described polynucleotides.

### DETAILED DESCRIPTION

[0019] The nucleotide sequences of the sESTs of the present invention are reported in the Sequence Listing below. Table 2 lists the “Clone ID Nos.” assigned by applicants to each SEQ ID NO: in the Sequence Listing.

TABLE 2
Each pair of entries in this table consists of the SEQ ID NO (e.g., 1, 2,
etc.) followed by the Clone ID No. for such sequence
(e.g., B11, B18, etc.).

| | | | | | |
|---|---|---|---|---|---|
| 1 | BK8 | 508 | FO292 | 1014 | HR753 |
| 2 | BV216 | 509 | FO316 | 1015 | HR731 |
| 3 | BV274 | 510 | FO324 | 1016 | EN116 |
| 4 | BV48 | 511 | FO327 | 1017 | EM341 |
| 5 | DN351 | 512 | FO348 | 1018 | FJ283 |
| 6 | DN381 | 513 | FO36 | 1019 | FJ307 |
| 7 | DN405 | 514 | FO38 | 1020 | FJ70 |
| 8 | DU651 | 515 | FO40 | 1021 | FM176 |
| 9 | DU660 | 516 | FO66 | 1022 | FM197 |
| 10 | DU675 | 517 | FO75 | 1023 | FM205 |
| 11 | DU684 | 518 | FP185 | 1024 | FM208 |
| 12 | DD364 | 519 | FP193 | 1025 | FM229 |
| 13 | DD379 | 520 | FP233 | 1026 | FQ419 |
| 14 | DD389 | 521 | FP239 | 1027 | GX48 |
| 15 | DD401 | 522 | FP246 | 1028 | GX5 |
| 16 | DD413 | 523 | FP262 | 1029 | GX92 |
| 17 | DD426 | 524 | FP268 | 1030 | FM289 |
| 18 | DD428 | 525 | FP271 | 1031 | FM290 |
| 19 | DN293 | 526 | FP273 | 1032 | FM296 |
| 20 | DD454 | 527 | FQ505 | 1033 | FM300 |
| 21 | DD472 | 528 | DN647 | 1034 | FM312 |
| 22 | DD475 | 529 | DN650 | 1035 | GU512 |
| 23 | DT306 | 530 | DN676 | 1036 | GU534 |
| 24 | DW282 | 531 | DO94 | 1037 | GU608 |
| 25 | DW300 | 532 | FR292 | 1038 | GX159 |
| 26 | DW303 | 533 | FR436 | 1039 | GX97 |
| 27 | DW323 | 534 | FR451 | 1040 | EW304 |
| 28 | DT258 | 535 | FR473 | 1041 | EY281 |
| 29 | DW246 | 536 | FS10 | 1042 | EY290 |
| 30 | DW324 | 537 | FS106 | 1043 | EY304 |
| 31 | DW333 | 538 | FS107 | 1044 | EY313 |
| 32 | DW1001 | 539 | FS143 | 1045 | FK295 |
| 33 | DW831 | 540 | FS173 | 1046 | FK301 |
| 34 | DW859 | 541 | FS28 | 1047 | FK317 |
| 35 | DW875 | 542 | FS31 | 1048 | FK328 |
| 36 | DW888 | 543 | FS40 | 1049 | FK349 |
| 37 | DW901 | 544 | FV35 | 1050 | FK350 |
| 38 | DW902 | 545 | FV49 | 1051 | FK354 |
| 39 | DW904 | 546 | FV68 | 1052 | FK365 |
| 40 | DW905 | 547 | FW13 | 1053 | FQ105 |
| 41 | DW906 | 548 | FW64 | 1054 | FQ239 |
| 42 | DW929 | 549 | FY127 | 1055 | FQ360 |
| 43 | DW981 | 550 | FY136 | 1056 | FQ45 |
| 44 | DX191 | 551 | FY60 | 1057 | GU353 |
| 45 | DX219 | 552 | FY65 | 1058 | GX167 |
| 46 | DX245 | 553 | FY72 | 1059 | GX183 |
| 47 | DX256 | 554 | DN1112 | 1060 | GX208 |
| 48 | DX267 | 555 | DN1118 | 1061 | GX210 |
| 49 | DX66 | 556 | DN1122 | 1062 | FM369 |
| 50 | DX81 | 557 | DN782 | 1063 | FM375 |
| 51 | DY780 | 558 | DN793 | 1064 | FM389 |
| 52 | DY803 | 559 | DN795 | 1065 | FM432 |
| 53 | DY809 | 560 | DN806 | 1066 | FM459 |
| 54 | DY814 | 561 | DN809 | 1067 | FM462 |
| 55 | DY261 | 562 | DN810 | 1068 | FM479 |
| 56 | DY264 | 563 | DN814 | 1069 | GX301 |
| 57 | DY266 | 564 | DN815 | 1070 | GX336 |
| 58 | DY271 | 565 | DN823 | 1071 | GX354 |
| 59 | DY287 | 566 | DN827 | 1072 | GX361 |
| 60 | DY297 | 567 | DN833 | 1073 | GX403 |
| 61 | DY306 | 568 | DN834 | 1074 | GX408 |
| 62 | DY307 | 569 | DN850 | 1075 | GX418 |
| 63 | DY643 | 570 | DO913 | 1076 | GU830 |
| 64 | DY656 | 571 | DO923 | 1077 | GU925 |
| 65 | DY675 | 572 | DO935 | 1078 | GU940 |
| 66 | DY988 | 573 | DO938 | 1079 | GX1031 |
| 67 | DY992 | 574 | DO944 | 1080 | GX496 |
| 68 | DY225 | 575 | DO949 | 1081 | GX504 |
| 69 | DY236 | 576 | DO952 | 1082 | GX509 |
| 70 | DY242 | 577 | DQI2 | 1083 | GX536 |
| 71 | DY254 | 578 | DT2 | 1084 | GX540 |
| 72 | DY914 | 579 | DT44 | 1085 | GX645 |
| 73 | DY946 | 580 | DT53 | 1086 | GX700 |
| 74 | DY955 | 581 | DT8 | 1087 | GX730 |
| 75 | DY959 | 582 | FQ661 | 1088 | GX7S0 |
| 76 | DY961 | 583 | FQ672 | 1089 | GX753 |
| 77 | DY981 | 584 | FQ696 | 1090 | GX760 |
| 78 | DY357 | 585 | FR1087 | 1091 | GX814 |
| 79 | DY358 | 586 | FR927 | 1092 | GX851 |
| 80 | DY381 | 587 | FR938 | 1093 | GX909 |
| 81 | DY413 | 588 | FR980 | 1094 | GY102 |
| 82 | DY414 | 589 | FV122 | 1095 | GY105 |
| 83 | DY415 | 590 | FV131 | 1096 | GY138 |
| 84 | DY431 | 591 | FV132 | 1097 | GY211 |
| 85 | DY433 | 592 | FV84 | 1098 | GX1082 |
| 86 | DY436 | 593 | FV85 | 1099 | GX1108 |
| 87 | DY543 | 594 | FV95 | 1100 | GX1140 |
| 88 | DY565 | 595 | FX115 | 1101 | GX1165 |
| 89 | DY585 | 596 | FX127 | 1102 | GX576 |
| 90 | DY331 | 597 | FX154 | 1103 | GX595 |
| 91 | DY586 | 598 | FY187 | 1104 | GX606 |
| 92 | DY696 | 599 | FY199 | 1105 | GX619 |
| 93 | DY611 | 600 | FY201 | 1106 | GG874 |
| 94 | EC259 | 601 | FY202 | 1107 | GG858 |
| 95 | DY711 | 602 | FY243 | 1108 | GG836 |
| 96 | EC248 | 603 | FY265 | 1109 | GG8 |
| 97 | EC32 | 604 | FY316 | 1110 | GG3 |
| 98 | DO703 | 605 | FY318 | 1111 | HA510 |
| 99 | DO713 | 606 | FY321 | 1112 | HA422 |
| 100 | DR294 | 607 | FY354 | 1113 | HA382 |
| 101 | DY1 | 608 | FY356 | 1114 | HA360 |
| 102 | DY10 | 609 | FY421 | 1115 | HA249 |
| 103 | DY106 | 610 | FY430 | 1116 | HA199 |
| 104 | DY117 | 611 | FY455 | 1117 | HA192 |
| 105 | DY148 | 612 | FY484 | 1118 | GZ568 |
| 106 | DY167 | 613 | FY524 | 1119 | GY520 |
| 107 | DY17 | 614 | FY530 | 1120 | GY515 |
| 108 | DY174 | 615 | FY628 | 1121 | GY330 |
| 109 | DY175 | 616 | DQ242 | 1122 | GY307 |
| 110 | DY178 | 617 | DQ262 | 1123 | HA81 |
| 111 | DY23 | 618 | DQ276 | 1124 | HA73 |
| 112 | DY27 | 619 | DQ285 | 1125 | HA29 |
| 113 | DY41 | 620 | DQ304 | 1126 | HA24 |
| 114 | DY42 | 621 | DQ313 | 1127 | HA18 |
| 115 | DY8 | 622 | DQ51 | 1128 | GZ78 |
| 116 | DY93 | 623 | DQ54 | 1129 | GZ70 |
| 117 | EB107 | 624 | DR628 | 1130 | GZ7 |
| 118 | EB113 | 625 | GU215 | 1131 | GZ496 |
| 119 | EB163 | 626 | FM481 | 1132 | GZ495 |
| 120 | EB25 | 627 | DT117 | 1133 | GZ485 |
| 121 | EB77 | 628 | DT133 | 1134 | GZ436 |
| 122 | EC172 | 629 | DT139 | 1135 | GZ420 |
| 123 | EC302 | 630 | DT164 | 1136 | GZ378 |
| 124 | EC317 | 631 | DU160 | 1137 | GZ37 |
| 125 | EC328 | 632 | DU164 | 1138 | GY558 |
| 126 | EC341 | 633 | DU166 | 1139 | GG894 |
| 127 | EC349 | 634 | DU4 | 1140 | GG907 |
| 128 | ED105 | 635 | DU75 | 1141 | GN114 |
| 129 | ED21 | 636 | FY386 | 1142 | GN115 |
| 130 | ED23 | 637 | FY388 | 1143 | GN145 |
| 131 | ED30 | 638 | FY398 | 1144 | GN97 |
| 132 | ED43 | 639 | FY414 | 1145 | HB443 |
| 133 | ED54 | 640 | GA48 | 1146 | HC324 |
| 134 | EE177 | 641 | GA63 | 1147 | HC327 |
| 135 | EE65 | 642 | GA64 | 1148 | HC505 |
| 136 | DQ365 | 643 | DT382 | 1149 | HC724 |
| 137 | DK393 | 644 | DT385 | 1150 | HA1054 |
| 138 | DK399 | 645 | DT388 | 1151 | HB1041 |
| 139 | DO1128 | 646 | DT464 | 1152 | HB746 |
| 140 | DO1150 | 647 | DT470 | 1153 | HB752 |
| 141 | DZ34 | 648 | DT478 | 1154 | HB975 |
| 142 | DZ42 | 649 | DT482 | 1155 | HC705 |
| 143 | EE116 | 650 | DU114 | 1156 | HA791 |
| 144 | EE93 | 651 | DU118 | 1157 | HC1002 |
| 145 | DJ387 | 652 | DU123 | 1158 | HC1071 |
| 146 | DJ402 | 653 | DU133 | 1159 | HC1089 |
| 147 | DN551 | 654 | DU156 | 1160 | HC831 |
| 148 | DN559 | 655 | DU157 | 1161 | HC986 |
| 149 | DN603 | 656 | FZ5 | 1162 | GY72 |
| 150 | DN629 | 657 | FZ87 | 1163 | HG159 |
| 151 | DN631 | 658 | DW181 | 1164 | HG620 |
| 152 | DO111 | 659 | DW309 | 1165 | HD161 |
| 153 | DO118 | 660 | DX1 | 1166 | HD353 |
| 154 | DO15 | 661 | DX15 | 1167 | HD378 |
| 155 | DO157 | 662 | DX19 | 1168 | HD417 |
| 156 | DO19 | 663 | DX22 | 1169 | HD427 |
| 157 | EJ53 | 664 | DX29 | 1170 | HD434 |
| 158 | EJ90 | 665 | DX3 | 1171 | HD499 |
| 159 | EM270 | 666 | DX4 | 1172 | HD569 |
| 160 | EM278 | 667 | FZ428 | 1173 | HD627 |
| 161 | EN186 | 668 | FZ163 | 1174 | HD648 |
| 162 | EN215 | 669 | DY474 | 1175 | HE111 |
| 163 | EN217 | 670 | FZ139 | 1176 | HE142 |
| 164 | EN234 | 671 | FX76 | 1177 | HE178 |
| 165 | EN239 | 672 | FX65 | 1178 | HE91 |
| 166 | EN256 | 673 | FX55 | 1179 | HF289 |
| 167 | EN260 | 674 | DU536 | 1180 | HG444 |
| 168 | EN264 | 675 | FZ534 | 1181 | HF137 |
| 169 | EN266 | 676 | DU515 | 1182 | HD706 |
| 170 | EN271 | 677 | DU475 | 1183 | HG710 |
| 171 | EN274 | 678 | DU462 | 1184 | HG733 |
| 172 | EN287 | 679 | DU353 | 1185 | HG775 |
| 173 | EN310 | 680 | DU341 | 1186 | HI222 |
| 174 | EN342 | 681 | DU306 | 1187 | HI39 |
| 175 | EN363 | 682 | DU278 | 1188 | HH215 |
| 176 | EN423 | 683 | DU244 | 1189 | HH357 |
| 177 | EH106 | 684 | DU238 | 1190 | HH372 |
| 178 | EH145 | 685 | DU236 | 1191 | HH378 |
| 179 | EH166 | 686 | DU231 | 1192 | HH390 |
| 180 | EH167 | 687 | FZ639 | 1193 | HH396 |
| 181 | EH178 | 688 | GC456 | 1194 | HH404 |
| 182 | EH180 | 689 | GG126 | 1195 | HH433 |
| 183 | EH186 | 690 | GG129 | 1196 | HI2 |
| 184 | EH188 | 691 | GG152 | 1197 | HH544 |
| 185 | EH189 | 692 | GG170 | 1198 | HH608 |
| 186 | EH190 | 693 | GG182 | 1199 | HH612 |
| 187 | EH203 | 694 | GG217 | 1200 | HH625 |
| 188 | EH206 | 695 | GG440 | 1201 | HH640 |
| 189 | EH95 | 696 | GG619 | 1202 | HH648 |
| 190 | EJ148 | 697 | DX279 | 1203 | HH691 |
| 191 | EJ179 | 698 | DX288 | 1204 | HJ120 |
| 192 | EJ224 | 699 | DX290 | 1205 | HJ140 |
| 193 | EJ240 | 700 | DX295 | 1206 | HJ181 |
| 194 | EJ254 | 701 | DX298 | 1207 | HJ184 |
| 195 | EJ258 | 702 | FZ209 | 1208 | HJ22 |
| 196 | EJ265 | 703 | FZ254 | 1209 | HJ253 |
| 197 | EJ280 | 704 | FZ346 | 1210 | HJ265 |
| 198 | EJ285 | 705 | GA82 | 1211 | HJ362 |
| 199 | EJ307 | 706 | GA85 | 1212 | HJ395 |
| 200 | EJ38 | 707 | GA91 | 1213 | HJ411 |
| 201 | DO235 | 708 | DX299 | 1214 | HJ444 |
| 202 | DO238 | 709 | DX304 | 1215 | HJ65 |
| 203 | DO263 | 710 | DX309 | 1216 | HJ674 |
| 204 | DO319 | 711 | DX316 | 1217 | HJ705 |
| 205 | EJ324 | 712 | DX328 | 1218 | HJ81 |
| 206 | EN470 | 713 | DX336 | 1219 | HJ862 |
| 207 | EN477 | 714 | DX354 | 1220 | HJ949 |
| 208 | EN539 | 715 | DX357 | 1221 | HK10 |
| 209 | EP451 | 716 | DX359 | 1222 | HK26 |
| 210 | EO10 | 717 | DX363 | 1223 | HK60 |
| 211 | EO14 | 718 | DX364 | 1224 | HJ1037 |
| 212 | EO48 | 719 | DY478 | 1225 | HJ968 |
| 213 | EO58 | 720 | DY497 | 1226 | HJ981 |
| 214 | EO60 | 721 | DY508 | 1227 | HJ994 |
| 215 | EO62 | 722 | EA89 | 1228 | HJ995 |
| 216 | EO68 | 723 | EA9 | 1229 | HK189 |
| 217 | EO89 | 724 | EA90 | 1230 | HK234 |
| 218 | EO90 | 725 | GC52 | 1231 | HK650 |
| 219 | EO92 | 726 | GC57 | 1232 | HK658 |
| 220 | EO97 | 727 | GC585 | 1233 | HK669 |
| 221 | EP108 | 728 | GC74 | 1234 | HK713 |
| 222 | EP165 | 729 | GE28 | 1235 | HK899 |
| 223 | EP219 | 730 | GE41 | 1236 | HE187 |
| 224 | EP234 | 731 | GE51 | 1237 | HK162 |
| 225 | EP277 | 732 | GE60 | 1238 | HL25 |
| 226 | EP378 | 733 | GE68 | 1239 | HL380 |
| 227 | EP38 | 734 | GE80 | 1240 | HL73 |
| 228 | EO109 | 735 | GE82 | 1241 | HM50 |
| 229 | EO120 | 736 | GE89 | 1242 | HM54 |
| 230 | EQ166 | 737 | DY516 | 1243 | HM91 |
| 231 | EQ187 | 738 | DY529 | 1244 | HM236 |
| 232 | EQ188 | 739 | DY530 | 1245 | HM280 |
| 233 | EQ190 | 740 | DY538 | 1246 | HM372 |
| 234 | EQ194 | 741 | DY830 | 1247 | HM380 |
| 235 | EQ207 | 742 | DY857 | 1248 | HM422 |
| 236 | EQ208 | 743 | EA17 | 1249 | HM444 |
| 237 | EQ214 | 744 | EA36 | 1250 | HM497 |
| 238 | EQ215 | 745 | GG73 | 1251 | HM544 |
| 239 | EQ218 | 746 | DU544 | 1252 | HM643 |
| 240 | EQ219 | 747 | DU560 | 1253 | HN72 |
| 241 | EQ220 | 748 | DZ109 | 1254 | HN78 |
| 242 | EQ221 | 749 | EA105 | 1255 | HO107 |
| 243 | EQ226 | 750 | EA106 | 1256 | HO237 |
| 244 | EQ229 | 751 | EA110 | 1257 | HO266 |
| 245 | EQ230 | 752 | EA123 | 1258 | HO277 |
| 246 | EQ231 | 753 | EA46 | 1259 | HO283 |
| 247 | EQ233 | 754 | EA58 | 1260 | HO292 |
| 248 | EQ237 | 755 | EA7 | 1261 | HO294 |
| 249 | EQ261 | 756 | EA82 | 1262 | HO305 |
| 250 | EQ272 | 757 | GE361 | 1263 | HO315 |
| 251 | ER104 | 758 | FZ510 | 1264 | HO332 |
| 252 | ER106 | 759 | GE387 | 1265 | HO358 |
| 253 | ER128 | 760 | GE410 | 1266 | HO476 |
| 254 | ER134 | 761 | GE463 | 1267 | HO481 |
| 255 | ER174 | 762 | GE466 | 1268 | HO502 |
| 256 | ER201 | 763 | GE468 | 1269 | HO54 |
| 257 | ER77 | 764 | GE471 | 1270 | HO60 |
| 258 | ER80 | 765 | GE524 | 1271 | HO600 |
| 259 | ER97 | 766 | GE539 | 1272 | HO617 |
| 260 | ES136 | 767 | GE548 | 1273 | HO640 |
| 261 | ES306 | 768 | GE549 | 1274 | HO663 |
| 262 | ES35 | 769 | GE99 | 1275 | HO688 |
| 263 | ES37 | 770 | GF151 | 1276 | HO692 |
| 264 | ES206 | 771 | GF179 | 1277 | HO693 |
| 265 | ET13 | 772 | GF99 | 1278 | HO703 |
| 266 | ET22 | 773 | GB261 | 1279 | HO717 |
| 267 | ET39 | 774 | GC499 | 1280 | HO722 |
| 268 | ET84 | 775 | GD177 | 1281 | HO799 |
| 269 | EF121 | 776 | GD7 | 1282 | HO801 |
| 270 | EF129 | 777 | GE300 | 1283 | HO817 |
| 271 | EF45 | 778 | DX179 | 1284 | HO82 |
| 272 | EF48 | 779 | DY757 | 1285 | HK719 |
| 273 | EF5 | 780 | EC392 | 1286 | HO1077 |
| 274 | FF88 | 781 | EE15 | 1287 | HO1080 |
| 275 | EG194 | 782 | DU408 | 1288 | HO1087 |
| 276 | EG251 | 783 | DU410 | 1289 | HO1143 |
| 277 | EH12 | 784 | DU416 | 1290 | HO1176 |
| 278 | EH213 | 785 | DU447 | 1291 | HO1183 |
| 279 | EH22 | 786 | DX111 | 1292 | HO1216 |
| 280 | EH221 | 787 | DX112 | 1293 | HO1271 |
| 281 | EH248 | 788 | DX123 | 1294 | HO1329 |
| 282 | EH29 | 789 | DX138 | 1295 | HO1434 |
| 283 | EH61 | 790 | DX146 | 1296 | HO1441 |
| 284 | EH68 | 791 | DX153 | 1297 | HO1453 |
| 285 | EH78 | 792 | DX157 | 1298 | HO854 |
| 286 | EH80 | 793 | EE4 | 1299 | HO868 |
| 287 | ER311 | 794 | FZ676 | 1300 | HP262 |
| 288 | ER329 | 795 | FZ683 | 1301 | HQ36 |
| 289 | ER343 | 796 | GD309 | 1302 | HQ72 |
| 290 | ER366 | 797 | GD358 | 1303 | GM16 |
| 291 | ER369 | 798 | GG543 | 1304 | GM286 |
| 292 | ER381 | 799 | FX516 | 1305 | GM295 |
| 293 | ER395 | 800 | FX536 | 1306 | GM335 |
| 294 | ER399 | 801 | FZ1032 | 1307 | GM365 |
| 295 | ER408 | 802 | FZ1041 | 1308 | HR397 |
| 296 | ER418 | 803 | FZ1072 | 1309 | HR560 |
| 297 | ER430 | 804 | FZ781 | 1310 | HR593 |
| 298 | ER471 | 805 | GA147 | 1311 | HR598 |
| 299 | ER476 | 806 | GA284 | 1312 | HT13 |
| 300 | ER493 | 807 | DY723 | 1313 | HT137 |
| 301 | ER496 | 808 | DY737 | 1314 | HT166 |
| 302 | ER498 | 809 | DY739 | 1315 | HT176 |
| 303 | ER524 | 810 | EC399 | 1316 | HT193 |
| 304 | EW13 | 811 | EM254 | 1317 | HT43 |
| 305 | EX25 | 812 | FX194 | 1318 | HT81 |
| 306 | EX53 | 813 | FX234 | 1319 | HW149 |
| 307 | EY165 | 814 | FX281 | 1320 | HW152 |
| 308 | EY29 | 815 | FX317 | 1321 | HW190 |
| 309 | EZ35 | 816 | FX353 | 1322 | HW204 |
| 310 | EZ4 | 817 | FX395 | 1323 | HW221 |
| 311 | EZ88 | 818 | GA293 | 1324 | HW243 |
| 312 | EZ93 | 819 | GA321 | 1325 | HW261 |
| 313 | FA8 | 820 | GA327 | 1326 | HW368 |
| 314 | EV234 | 821 | GB160 | 1327 | HW74 |
| 315 | EW101 | 822 | GA132 | 1328 | HX10 |
| 316 | EW109 | 823 | GA135 | 1329 | HX102 |
| 317 | EW150 | 824 | GA205 | 1330 | HX110 |
| 318 | EY197 | 825 | GB814 | 1331 | HX1I3 |
| 319 | EY206 | 826 | GF87 | 1332 | HX155 |
| 320 | EY215 | 827 | GG687 | 1333 | HX188 |
| 321 | EZ209 | 828 | GG692 | 1334 | HX29 |
| 322 | FA139 | 829 | GG694 | 1335 | HX50 |
| 323 | FA171 | 830 | GG702 | 1336 | HY13 |
| 324 | FA252 | 831 | GG705 | 1337 | HY3 |
| 325 | FA28 | 832 | GP23 | 1338 | HY55 |
| 326 | FA316 | 833 | GP56 | 1339 | HY57 |
| 327 | FA95 | 834 | GP61 | 1340 | HZ15 |
| 328 | FB264 | 835 | GP65 | 1341 | HZ8 |
| 329 | FB38 | 836 | DD115 | 1342 | IA1 |
| 330 | FB71 | 837 | DD119 | 1343 | IA21 |
| 331 | FB78 | 838 | DD12 | 1344 | IA32 |
| 332 | FC12 | 839 | DD127 | 1345 | IA36 |
| 333 | FB349 | 840 | DD177 | 1346 | IB2 |
| 334 | FC136 | 841 | DD204 | 1347 | IC2 |
| 335 | FC170 | 842 | DD207 | 1348 | IC9 |
| 336 | FD152 | 843 | DD211 | 1349 | HY229 |
| 337 | FE141 | 844 | DD217 | 1350 | HY244 |
| 338 | FE5 | 845 | DD504 | 1351 | HY344 |
| 339 | FD131 | 846 | DD509 | 1352 | HY370 |
| 340 | EC425 | 847 | DD518 | 1353 | HY374 |
| 341 | EC428 | 848 | DD537 | 1354 | HY404 |
| 342 | ED204 | 849 | DD541 | 1355 | HY419 |
| 343 | ED205 | 850 | DD71 | 1356 | HY435 |
| 344 | ED210 | 851 | DH941 | 1357 | HZ103 |
| 345 | ED223 | 852 | DQ194 | 1358 | HZ109 |
| 346 | DI301 | 853 | DQ204 | 1359 | HZ111 |
| 347 | DI303 | 854 | DQ215 | 1360 | HZ115 |
| 348 | DI310 | 855 | DQ216 | 1361 | HZ71 |
| 349 | DI39 | 856 | EK423 | 1362 | HZ76 |
| 350 | DJ90 | 857 | EK424 | 1363 | HZ88 |
| 351 | DM290 | 858 | EK450 | 1364 | HW115 |
| 352 | DM304 | 859 | EL15 | 1365 | HW128 |
| 353 | DN618 | 860 | DD285 | 1366 | HW477 |
| 354 | DN896 | 861 | EK598 | 1367 | HW483 |
| 355 | DN904 | 862 | EK622 | 1368 | HW491 |
| 356 | FG119 | 863 | EK626 | 1369 | HW499 |
| 357 | FG126 | 864 | EK649 | 1370 | HW507 |
| 358 | FG140 | 865 | GO653 | 1371 | HZ116 |
| 359 | FG193 | 866 | GP107 | 1372 | HZ162 |
| 360 | FG197 | 867 | GP123 | 1373 | HZ185 |
| 361 | FG198 | 868 | GP168 | 1374 | HZ201 |
| 362 | FG208 | 869 | GP232 | 1375 | HZ224 |
| 363 | FG265 | 870 | GP274 | 1376 | HZ262 |
| 364 | FG274 | 871 | GP297 | 1377 | IA106 |
| 365 | FG278 | 872 | GP304 | 1378 | IA110 |
| 366 | FG281 | 873 | GP329 | 1379 | IA114 |
| 367 | FG291 | 874 | GP338 | 1380 | IA153 |
| 368 | FG294 | 875 | GP340 | 1381 | IA157 |
| 369 | FG340 | 876 | GQ13 | 1382 | lA167 |
| 370 | FG363 | 877 | GQI8 | 1383 | IA183 |
| 371 | FG372 | 878 | GQ22 | 1384 | IA188 |
| 372 | FG380 | 879 | GQ38 | 1385 | IA200 |
| 373 | FG401 | 880 | GQ40 | 1386 | IA220 |
| 374 | FG99 | 881 | GQ56 | 1387 | IA64 |
| 375 | FI203 | 882 | GQ6 | 1388 | IA69 |
| 376 | FE311 | 883 | DD312 | 1389 | IA86 |
| 377 | FE315 | 884 | DD352 | 1390 | HW936 |
| 378 | FE322 | 885 | EK145 | 1391 | HW1017 |
| 379 | FE329 | 886 | EK208 | 1392 | HW1044 |
| 380 | FE341 | 887 | EK223 | 1393 | HW1059 |
| 381 | FE366 | 888 | EK234 | 1394 | HW430 |
| 382 | FE375 | 889 | EK480 | 1395 | HW432 |
| 383 | FE412 | 890 | EK491 | 1396 | HW440 |
| 384 | FE415 | 891 | EK499 | 1397 | HW456 |
| 385 | FE442 | 892 | EK571 | 1398 | HW518 |
| 386 | FE472 | 893 | EK578 | 1399 | HW591 |
| 387 | FE557 | 894 | EK581 | 1400 | HW598 |
| 388 | FE568 | 895 | EK591 | 1401 | HW627 |
| 389 | FE619 | 896 | DD215 | 1402 | HW646 |
| 390 | FE676 | 897 | EK634 | 1403 | HW649 |
| 391 | FE682 | 898 | EL358 | 1404 | HW693 |
| 392 | FF150 | 899 | EL360 | 1405 | HW695 |
| 393 | FF153 | 900 | EL387 | 1406 | HW697 |
| 394 | FF168 | 901 | EL391 | 1407 | HW711 |
| 395 | FF175 | 902 | EM111 | 1408 | HW715 |
| 396 | FF181 | 903 | EM112 | 1409 | HW730 |
| 397 | FF46 | 904 | EM12 | 1410 | HW732 |
| 398 | FF49 | 905 | EM125 | 1411 | HW741 |
| 399 | FF97 | 906 | EM40 | 1412 | HW750 |
| 400 | FG41 | 907 | EM42 | 1413 | HW786 |
| 401 | FG437 | 908 | EM58 | 1414 | HW810 |
| 402 | FG441 | 909 | 6F185 | 1415 | HW846 |
| 403 | FG448 | 910 | GF187 | 1416 | HW849 |
| 404 | FG45 | 911 | GF196 | 1417 | IB15 |
| 405 | FG492 | 912 | GF197 | 1418 | IB19 |
| 406 | FG504 | 913 | GF207 | 1419 | IB22 |
| 407 | FG565 | 914 | GF209 | 1420 | IB28 |
| 408 | FG567 | 915 | GF212 | 1421 | IB36 |
| 409 | FG57 | 916 | GF218 | 1422 | IB49 |
| 410 | FG577 | 917 | GF221 | 1423 | IC103 |
| 411 | FG615 | 918 | GF222 | 1424 | IC126 |
| 412 | FG625 | 919 | GF250 | 1425 | IC132 |
| 413 | FG630 | 920 | GF255 | 1426 | IC142 |
| 414 | FG659 | 921 | GF256 | 1427 | IC155 |
| 415 | FG708 | 922 | GI28 | 1428 | IC54 |
| 416 | FG91 | 923 | GI3 | 1429 | IC87 |
| 417 | FG884 | 924 | GI30 | 1430 | IC92 |
| 418 | FG891 | 925 | GI51 | 1431 | IE146 |
| 419 | FG909 | 926 | GI63 | 1432 | IE147 |
| 420 | FG912 | 927 | GI7 | 1433 | IE149 |
| 421 | FG949 | 928 | GI74 | 1434 | IE169 |
| 422 | FG952 | 929 | GI88 | 1435 | IZ6 |
| 423 | FG965 | 930 | GI9 | 1436 | JE33 |
| 424 | FH10 | 931 | DY874 | 1437 | JE44 |
| 425 | FH116 | 932 | DY886 | 1438 | JE52 |
| 426 | FH123 | 933 | DY900 | 1439 | IE10 |
| 427 | FH13 | 934 | EM358 | 1440 | IE47 |
| 428 | FH136 | 935 | EM381 | 1441 | 1E73 |
| 429 | FH149 | 936 | EM386 | 1442 | JA37 |
| 430 | FH17 | 937 | EM388 | 1443 | JA78 |
| 431 | FH170 | 938 | EM396 | 1444 | JB12 |
| 432 | FH24 | 939 | EM397 | 1445 | JB23 |
| 433 | FH3 | 940 | EM401 | 1446 | IE352 |
| 434 | FH39 | 941 | EM406 | 1447 | IE362 |
| 435 | FH56 | 942 | EM408 | 1448 | IH32 |
| 436 | FH6 | 943 | EM409 | 1449 | IH113 |
| 437 | FH66 | 944 | EM423 | 1450 | 1J101 |
| 438 | FM109 | 945 | EM424 | 1451 | 1J163 |
| 439 | FM13 | 946 | FE196 | 1452 | 1J167 |
| 440 | FM15 | 947 | FE204 | 1453 | IF28 |
| 441 | FM150 | 948 | FE205 | 1454 | IF376 |
| 442 | FM170 | 949 | FE207 | 1455 | IF456 |
| 443 | FM28 | 950 | FE215 | 1456 | IF87 |
| 444 | FM3 | 951 | FE222 | 1457 | IJ1201 |
| 445 | FM32 | 952 | FE227 | 1458 | IJ1220 |
| 446 | FM36 | 953 | FE228 | 1459 | IJ1237 |
| 447 | FM60 | 954 | FE248 | 1460 | IJ1240 |
| 448 | FM86 | 955 | FE263 | 1461 | IJ1247 |
| 449 | FM95 | 956 | FE271 | 1462 | IJ1287 |
| 450 | FM98 | 957 | GF296 | 1463 | IJ1292 |
| 451 | FM99 | 958 | GN38 | 1464 | IJ1299 |
| 452 | FN172 | 959 | GN45 | 1465 | IJ583 |
| 453 | FN19 | 960 | GN60 | 1466 | IJ592 |
| 454 | FN29 | 961 | GN68 | 1467 | IJ597 |
| 455 | FN53 | 962 | GN82 | 1468 | IJ629 |
| 456 | FK199 | 963 | GR286 | 1469 | IJ638 |
| 457 | FK217 | 964 | EN10 | 1470 | IJ640 |
| 458 | FK23 | 965 | EN37 | 1471 | IJ642 |
| 459 | FK32 | 966 | FK127 | 1472 | IJ686 |
| 460 | FK59 | 967 | FK151 | 1473 | IG25 |
| 461 | FK78 | 968 | GS26 | 1474 | IG35 |
| 462 | FN189 | 969 | GS4 | 1475 | IH40 |
| 463 | FN191 | 970 | EV391 | 1476 | IH54 |
| 464 | FN203 | 971 | FG535 | 1477 | IJ288 |
| 465 | FN228 | 972 | FG852 | 1478 | IJ76 |
| 466 | FN229 | 973 | GT28 | 1479 | IF292 |
| 467 | FN251 | 974 | GT43 | 1480 | IF513 |
| 468 | FN254 | 975 | GT6 | 1481 | IF548 |
| 469 | FP134 | 976 | HR712 | 1482 | IJ1043 |
| 470 | FP14 | 977 | HR704 | 1483 | IJ1048 |
| 471 | FP163 | 978 | HR693 | 1484 | IJ1054 |
| 472 | FP172 | 979 | HR628 | 1485 | IJ1088 |
| 473 | FP71 | 980 | HR605 | 1486 | IJ777 |
| 474 | FP87 | 981 | EK341 | 1487 | IJ887 |
| 475 | EI118 | 982 | EK390 | 1488 | IJ907 |
| 476 | EI16 | 983 | EN108 | 1489 | IJ928 |
| 477 | EI187 | 984 | FK235 | 1490 | IJ942 |
| 478 | EI203 | 985 | GK428 | 1491 | IL1 |
| 479 | EI228 | 986 | GT56 | 1492 | IL100 |
| 480 | EI231 | 987 | FQ562 | 1493 | IL112 |
| 481 | EI236 | 988 | FQ605 | 1494 | IL28 |
| 482 | EI239 | 989 | FQ608 | 1495 | IK11 |
| 483 | EI243 | 990 | FQ609 | 1496 | IK14 |
| 484 | EI250 | 991 | FQ612 | 1497 | IK20 |
| 485 | EI255 | 992 | FS49 | 1498 | IK203 |
| 486 | EI264 | 993 | FS87 | 1499 | IK209 |
| 487 | EI273 | 994 | GM101 | 1500 | IK212 |
| 488 | FO11 | 995 | GM103 | 1501 | IK343 |
| 489 | FO125 | 996 | GM114 | 1502 | IK73 |
| 490 | FO128 | 997 | GM129 | 1503 | IO134 |
| 491 | FO133 | 998 | GM153 | 1504 | IO138 |
| 492 | FO135 | 999 | GM158 | 1505 | IO151 |
| 493 | FO147 | 1000 | GM196 | 1506 | IO202 |
| 494 | FO152 | 1001 | GM243 | 1507 | IO209 |
| 495 | FO160 | 1002 | GM259 | 1508 | IO31 |
| 496 | FO173 | 1003 | GM266 | 1509 | IO356 |
| 497 | FO182 | 1004 | HV38 | 1510 | IO420 |
| 498 | FO201 | 1005 | HV23 | 1511 | IO62 |
| 499 | FO209 | 1006 | HV199 | 1512 | IQ15 |
| 500 | FO211 | 1007 | HV181 | 1513 | IQ45 |
| 501 | FO215 | 1008 | HU212 | 1514 | IQ55 |
| 502 | FO253 | 1009 | HU141 | 1515 | IQ58 |
| 503 | FO254 | 1010 | HS555 | 1516 | IS488 |
| 504 | FO261 | 1011 | HR95 | 1517 | IS564 |
| 505 | FO267 | 1012 | HR906 | 1518 | IT23 |
| 506 | FO275 | 1013 | HR76 | 1519 | IT44 |
| 507 | FO290 | | | | |

[0020] The “Clone ID No.” for a particular clone consists of one or two letters followed by a number. The letters designate the tissue source from which the sEST was isolated. Table 3 below lists the various sources which were run through applicants' signal sequence trap. Thus, the tissue source for a particular sEST sequence can be identified in Table 3 by the one and two letter designations used in the relevant “Clone ID No.”. For example, a clone designated as “BA312” would have been isolated from a human placenta (26 yrs.) library (i.e., selection “BA”) as indicated in Table 3.

[0021] As used herein, “polynucleotide” includes single- and double-stranded RNAs, DNAs and RNA:DNA hybrids.

[0022] As used herein a “secreted” protein is one which, when expressed in a suitable host cell, is transported across or through a membrane, including transport as a result of signal sequences in its amino acid sequence. “Secreted” proteins include without limitation proteins secreted wholly (e.g., soluble proteins) or partially (e.g., receptors) from the cell in which they are expressed. “Secreted” proteins also include without limitation proteins which are transported across the membrane of the endoplpasmic reticulum.

[0023] Fragments of the proteins of the present invention which are capable of exhibiting biological activity are also encompassed by the present invention. Fragments of the protein may be in linear form or they may be cyclized using known methods, for example, as described in H. U. Saragovi, et al., Bio/Technology 10, 773-778 (1992) and in R. S. McDowell, et al., J. Amer. Chem. Soc. 114, 9245-9253 (1992), both of which are incorporated herein by reference. Such fragments may be fused to carrier molecules such as immunoglobulins for many purposes, including increasing the valency of protein binding sites. For example, fragments of the protein may be fused through “linker” sequences to the Fc portion of an immunoglobulin. For a bivalent form of the protein, such a fusion could be to the Fc portion of an IgG molecule. Other immunoglobulin isotypes may also be used to generate such fusions. For example, a protein-IgM fusion would generate a decavalent form of the protein of the invention.

[0024] The present invention also provides both full-length and mature forms of the disclosed proteins. The full-length form of the such proteins is identified in the sequence listing by translation of the nucleotide sequence of each disclosed clone. The mature form of such protein may be obtained by expression of the disclosed full-length polynucleotide (preferably those deposited with ATCC) in a suitable mammalian cell or other host cell. The sequence of the mature form of the protein may also be determinable from the amino acid sequence of the full-length form.

[0025] The present invention also provides genes corresponding to the cDNA sequences disclosed herein. The corresponding genes can be isolated in accordance with known methods using the sequence information disclosed herein. Such methods include the preparation of probes or primers from the disclosed sequence information for identification and/or amplification of genes in appropriate genomic libraries or other sources of genomic materials.

[0026] Where the protein of the present invention is membrane-bound (e.g., is a receptor), the present invention also provides for soluble forms of such protein. In such forms part or all of the intracellular and transmembrane domains of the protein are deleted such that the protein is fully secreted from the cell in which it is expressed. The intracellular and transmembrane domains of proteins of the invention can be identified in accordance with known techniques for determination of such domains from sequence information.

[0027] Species homologs of the disclosed polynucleotides and proteins are also provided by the present invention. Species homologs may be isolated and identified by making suitable probes or primers from the sequences provided herein and screening a suitable nucleic acid source from the desired species.

[0028] The invention also encompasses allelic variants of the disclosed polynucleotides or proteins; that is, naturally-occurring alternative forms of the isolated polynucleotide which also encode proteins which are identical, homologous or related to that encoded by the polynucleotides disclosed herein.

[0029] The invention also includes polynucleotides with sequences complementary to those of the polynucleotides disclosed herein.

[0030] The present invention also includes polynucleotides capable of hybridizing, preferably under reduced stringency conditions, more preferably under stringent conditions, most preferably under highly stringent conditions, to polynucleotides described herein. Examples of stringency conditions are shown in Table 1 below: high stringent conditions are those that are at least as stringent as, for example, conditions A-F; stringent conditions are at least as stringent as, for example, conditions G-L; and reduced stringency conditions are at least as stringent as, for example, conditions M-R.

TABLE 1

| Strin- | | | | |
|---|---|---|---|---|
| gency | Polynucleo- | Hybrid | Hybridization | Wash |
| Condi- | tide | Length | Temperature | Temperature |
| tion | Hybrid | (bp)^{‡} | and Buffer⁻ | and Buffer^{†} |
| A | DNA:DNA | ≧50 | 65° C.; 1xSSC -or- | 65° C.; 0.3xSSC |
| | | | 42° C.; 1xSSC, 50% | |
| | | | formamide | |
| B | DNA:DNA | <50 | T_{B}*; 1xSSC | T_{B}*; 1xSSC |
| C | DNA:RNA | ≧50 | 67° C.; 1xSSC -or- | 67° C.; 0.3xSSC |
| | | | 45° C.; 1xSSC, 50% | |
| | | | formamide | |
| D | DNA:RNA | <50 | T_{D}*; 1xSSC | T_{D}*; 1xSSC |
| E | RNA:RNA | ≧50 | 70° C.; 1xSSC -or- | 70° C.; 0.3xSSC |
| | | | 50° C.; 1xSSC, 50% | |
| | | | formamide | |
| F | RNA:RNA | <50 | T_{F}*; 1xSSC | T_{F}*; 1xSSC |
| G | DNA:DNA | ≧50 | 65° C.; 4xSSC -or- | 65° C.; 1xSSC |
| | | | 42° C.; 4xSSC, 50% | |
| | | | formamide | |
| H | DNA:DNA | <50 | T_{H}*; 4xSSC | T_{H}*; 4xSSC |
| I | DNA:RNA | ≧50 | 67° C.; 4xSSC -or- | 67° C.; 1xSSC |
| | | | 45° C.; 4xSSC, 50% | |
| | | | formamide | |
| J | DNA:RNA | <50 | T_{J}*; 4xSSC | T_{J}*; 4xSSC |
| K | RNA:RNA | ≧50 | 70° C.; 4xSSC -or- | 67° C.; 1xSSC |
| | | | 50° C.; 4xSSC, 50% | |
| | | | formamide | |
| L | RNA:RNA | <50 | T_{L}*; 2xSSC | T_{L}*; 2xSSC |
| M | DNA:DNA | ≧50 | 50° C.; 4xSSC -or- | 50° C.; 2xSSC |
| | | | 40° C.; 6xSSC, 50% | |
| | | | formamide | |
| N | DNA:DNA | <50 | T_{N}*; 6xSSC | T_{N}*; 6xSSC |
| O | DNA:RNA | ≧50 | 55° C.; 4xSSC -or- | 55° C.; 2xSSC |
| | | | 42° C.; 6xSSC, 50% | |
| | | | formamide | |
| P | DNA:RNA | <50 | T_{P}*; 6xSSC | T_{P}*; 6xSSC |
| Q | RNA:RNA | ≧50 | 60° C.; 4xSSC -or- | 60° C.; 2xSSC |
| | | | 45° C.; 6xSSC, 50% | |
| | | | formamide | |
| R | RNA:RNA | <50 | T_{R}*; 4xSSC | T_{R}*; 4xSSC |
| ^{‡}The hybrid length is that anticipated for the hybridized region(s) of the hybridizing polynucleotides. When hybridizing a polynucleotide to a target polynucleotide of unknown sequence, the hybrid length is assumed to be that of the hybridizing polynucleotide. When polynucleotides of known sequence are hybridized, the hybrid length | | | | |
| #can be determined by aligning the sequences of the polynucleotides and identifying the region or regions of optimal sequence complementarity. | | | | |
| ^{†}SSPE (1xSSPE is 0.15 M NaCl, 10 mM NaH₂PO₄, and 1.25 mM EDTA, pH 7.4) can be substituted for SSC (1xSSC is 0.15 M NaCl and 15 mM sodium citrate) in the hybridization and wash buffers; washes are performed for 15 minutes after hybridization is complete. | | | | |
| *T_{B}-T_{R}: The hybridization temperature for hybrids anticipated to be less than 50 base pairs in length should be 5-10° C. less than the melting temperature (Tₘ) of the hybrid, where Tₘ is determined according to the following equations. For hybrids less than 18 base pairs in length, Tₘ(° C.) | | | | |
| # = 2(# of A + T bases) + 4(# of G + C bases). For hybrids between 18 and 49 base pairs in length, Tₘ(° C.) = 81.5 + 16.6(log [Na⁺]) + 0.41(%G + C) − (600/N), where N is the number of bases in the hybrid, and [Na⁺] is the concentration of sodium ions in the | | | | |
| #hybridization buffer ([Na⁺] for 1xSSC = 0.165 M). | | | | |

[0031] Additional examples of stringency conditions for polynucleotide hybridization are provided in Sambrook, J., E. F. Fritsch, and T. Maniatis, 1989, Molecular Cloning: A Laboratory Manual, Cold Spring Harbor Laboratory Press, Cold Spring Harbor, N.Y., chapters 9 and 11, and Current Protocols in Molecular Biology, 1995, F. M. Ausubel et al., eds., John Wiley & Sons, Inc., sections 2.10 and 6.3-6.4, incorporated herein by reference.

[0032] Preferably, such hybridizing polynucleotides have at least 70% sequence identity (more preferably, at least 80% identity; most preferably at least 90% or 95% identity) with the polynucleotide of the present invention to which they hybridize, where sequence identity is determined by comparing the sequences of the hybridizing polynucleotides when aligned so as to maximize overlap and identity while minimizing sequence gaps. The isolated polynucleotide encoding the protein of the invention may be operably linked to an expression control sequence such as the pMT2 or pED expression vectors disclosed in Kaufman et al., Nucleic Acids Res. 19, 4485-4490 (1991), in order to produce the protein recombinantly. Many suitable expression control sequences are known in the art. General methods of expressing recombinant proteins are also known and are exemplified in R. Kaufman, Methods in Enzymology 185, 537-566 (1990). As defined herein “operably linked” means that the isolated polynucleotide of the invention and an expression control sequence are situated within a vector or cell in such a way that the protein is expressed by a host cell which has been transformed (transfected) with the ligated polynucleotide/expression control sequence.

[0033] A number of types of cells may act as suitable host cells for expression of the protein. Mammalian host cells include, for example, monkey COS cells. Chinese Hamster Ovary (CHO) cells, human kidney 293 cells, human epidermal A431 cells, human Colo205 cells, 3T3 cells, CV-1 cells, other transformed primate cell lines, normal diploid cells, cell strains derived from in vitro culture of primary tissue, primary explants, HeLa cells, mouse L cells, BHK, HL-60, U937, HaK or Jurkat cells.

[0034] Alternatively, it may be possible to produce the protein in lower eukaryotes such as yeast or in prokaryotes such as bacteria. Potentially suitable yeast strains include Saccharomyces cerevisiae, Schizosaccharomyces pombe, Kluyveromyces strains, Candida, or any yeast strain capable of expressing heterologous proteins. Potentially suitable bacterial strains include Escherichia coli, Bacillus subtilis, Salmonella typhimurium, or any bacterial strain capable of expressing heterologous proteins. If the protein is made in yeast or bacteria, it may be necessary to modify the protein produced therein, for example by phosphorylation or glycosylation of the appropriate sites, in order to obtain the functional protein. Such covalent attachments may be accomplished using known chemical or enzymatic methods.

[0035] The protein may also be produced by operably linking the isolated polynucleotide of the invention to suitable control sequences in one or more insect expression vectors, and employing an insect expression system. Materials and methods for baculovirus/insect cell expression systems are commercially available in kit form from, e.g., Invitrogen, San Diego, Calif., U.S.A. (the MaxBac® kit), and such methods are well known in the art, as described in Summers and Smith, Texas Agricultural Experiment Station Bulletin No. 1555 (1987), incorporated herein by reference. As used herein, an insect cell capable of expressing a polynucleotide of the present invention is “transformed.”

[0036] The protein of the invention may be prepared by culturing transformed host cells under culture conditions suitable to express the recombinant protein. The resulting expressed protein may then be purified from such culture (i.e., from culture medium or cell extracts) using known purification processes, such as gel filtration and ion exchange chromatography. The purification of the protein may also include an affinity column containing agents which will bind to the protein; one or more column steps over such affinity resins as concanavalin A-agarose, heparin-toyopearl® or Cibacrom blue 3GA Sepharose®; one or more steps involving hydrophobic interaction chromatography using such resins as phenyl ether, butyl ether, or propyl ether; or immunoaffinity chromatography.

[0037] Alternatively, the protein of the invention may also be expressed in a form which will facilitate purification. For example, it may be expressed as a fusion protein, such as those of maltose binding protein (MBP), glutathione-S-transferase (GST) or thioredoxin (TRX). Kits for expression and purification of such fusion proteins are commercially available from New England BioLab (Beverly, Mass.), Pharmacia (Piscataway, N.J.) and InVitrogen, respectively. The protein can also be tagged with an epitope and subsequently purified by using a specific antibody directed to such epitope. One such epitope (“Flag”) is commercially available from Kodak (New Haven, Conn.).

[0038] Finally, one or more reverse-phase high performance liquid chromatography (RP-HPLC) steps employing hydrophobic RP-HPLC media, e.g., silica gel having pendant methyl or other aliphatic groups, can be employed to further purify the protein. Some or all of the foregoing purification steps, in various combinations, can also be employed to provide a substantially homogeneous isolated recombinant protein. The protein thus purified is substantially free of other mammalian proteins and is defined in accordance with the present invention as an “isolated protein.”

[0039] The protein of the invention may also be expressed as a product of transgenic animals, e.g., as a component of the milk of transgenic cows, goats, pigs, or sheep which are characterized by somatic or germ cells containing a nucleotide sequence encoding the protein.

[0040] The protein may also be produced by known conventional chemical synthesis. Methods for constructing the proteins of the present invention by synthetic means are known to those skilled in the art. The synthetically-constructed protein sequences, by virtue of sharing primary, secondary or tertiary structural and/or conformational characteristics with proteins may possess biological properties in common therewith, including protein activity. Thus, they may be employed as biologically active or immunological substitutes for natural, purified proteins in screening of therapeutic compounds and in immunological processes for the development of antibodies.

[0041] The proteins provided herein also include proteins characterized by amino acid sequences similar to those of purified proteins but into which modification are naturally provided or deliberately engineered. For example, modifications in the peptide or DNA sequences can be made by those skilled in the art using known techniques. Modifications of interest in the protein sequences may include the alteration, substitution, replacement, insertion or deletion of a selected amino acid residue in the coding sequence. For example, one or more of the cysteine residues may be deleted or replaced with another amino acid to alter the conformation of the molecule. Techniques for such alteration, substitution. replacement, insertion or deletion are well known to those skilled in the art (see, e.g., U.S. Pat. No. 4,518,584). Preferably, such alteration, substitution, replacement, insertion or deletion retains the desired activity of the protein.

[0042] Other fragments and derivatives of the sequences of proteins which would be expected to retain protein activity in whole or in part and may thus be useful for screening or other immunological methodologies may also be easily made by those skilled in the art given the disclosures herein. Such modifications are believed to be encompassed by the present invention.

### USES AND BIOLOGICAL ACTIVITY

[0043] The polynucleotides and proteins of the present invention are expected to exhibit one or more of the uses or biological activities (including those associated with assays cited herein) identified below. Uses or activities described for proteins of the present invention may be provided by administration or use of such proteins or by administration or use of polynucleotides encoding such proteins (such as, for example, in gene therapies or vectors suitable for introduction of DNA).

[0044] Research Uses and Utilities

[0045] The polynucleotides provided by the present invention can be used by the research community for various purposes. The primary use of polynucleotides of the invention which are sESTs is as porbes for the identification and isolation of full-length cDNAs and genomic DNA molecules which correspond (i.e., is a longer polynucleotide sequence of which substantially the entire sEST is a fragment in the case of a full-length cDNA, or which encodes the sEST in the case of a genomic DNA molecule) to such sESTs. Techniques for use of such sequences as probes for larger cDNAs or genomic molecules are well known in the art.

[0046] The polynucleotides can also be used to express recombinant protein for analysis, characterization or therapeutic use; as markers for tissues in which the corresponding protein is preferentially expressed (either constitutively or at a particular stage of tissue differentiation or development or in disease states); as molecular weight markers on Southern gels; as chromosome markers or tags (when labeled) to identify chromosomes or to map related gene positions; to compare with endogenous DNA sequences in patients to identify potential genetic disorders; as probes to hybridize and thus discover novel, related DNA sequences; as a source of information to derive PCR primers for genetic fingerprinting; as a probe to “subtract-out” known sequences in the process of discovering other novel polynucleotides; for selecting and making oligomers for attachment to a “gene chip” or other support, including for examination of expression patterns; to raise anti-protein antibodies using DNA immunization techniques; and as an antigen to raise anti-DNA antibodies or elicit another immune response. Where the polynucleotide encodes a protein which binds or potentially binds to another protein (such as, for example, in a receptor-ligand interaction), the polynucleotide can also be used in interaction trap assays (such as, for example, that described in Gyuris et al., Cell 75:791-803 (1993)) to identify polynucleotides encoding the other protein with which binding occurs or to identify inhibitors of the binding interaction.

[0047] The proteins provided by the present invention can similarly be used in assay to determine biological activity, including in a panel of multiple proteins for high-throughput screening; to raise antibodies or to elicit another immune response; as a reagent (including the labeled reagent) in assays designed to quantitatively determine levels of the protein (or its receptor) in biological fluids; as markers for tissues in which the corresponding protein is preferentially expressed (either constitutively or at a particular stage of tissue differentiation or development or in a disease state); and, of course, to isolate correlative receptors or ligands. Where the protein binds or potentially binds to another protein (such as, for example, in a receptor-ligand interaction), the protein can be used to identify the other protein with which binding occurs or to identify inhibitors of the binding interaction. Proteins involved in these binding interactions can also be used to screen for peptide or small molecule inhibitors or agonists of the binding interaction.

[0048] Any or all of these research utilities are capable of being developed into reagent grade or kit format for commercialization as research products.

[0049] Methods for performing the uses listed above are well known to those skilled in the art. References disclosing such methods include without limitation “Molecular Cloning: A Laboratory Manual”, 2d ed., Cold Spring Harbor Laboratory Press, Sambrook, J., E. F. Fritsch and T. Maniatis eds., 1989, and “Methods in Enzymology: Guide to Molecular Cloning Techniques”, Academic Press, Berger, S. L. and A. R. Kimmel eds., 1987.

[0050] Nutritional Uses

[0051] Polynucleotides and proteins of the present invention can also be used as nutritional sources or supplements. Such uses include without limitation use as a protein or amino acid supplement, use as a carbon source, use as a nitrogen source and use as a source of carbohydrate. In such cases the protein or polynucleotide of the invention can be added to the feed of a particular organism or can be administered as a separate solid or liquid preparation, such as in the form of powder, pills, solutions, suspensions or capsules. In the case of microorganisms, the protein or polynucleotide of the invention can be added to the medium in or on which the microorganism is cultured.

[0052] Cytokine and Cell Proliferation/Differentiation Activity

[0053] A protein of the present invention may exhibit cytokine, cell proliferation (either inducing or inhibiting) or cell differentiation (either inducing or inhibiting) activity or may induce production of other cytokines in certain cell populations. Many protein factors discovered to date, including all known cytokines, have exhibited activity in one or more factor dependent cell proliferation assays, and hence the assays serve as a convenient confirmation of cytokine activity. The activity of a protein of the present invention is evidenced by any one of a number of routine factor dependent cell proliferation assays for cell lines including, without limitation, 32D, DA2, DA1G, T10, B9, B9/11, BaF3, MC9/G, M+ (preB M+), 2E8, RB5, DA1, 123, T1165, HT2, CTLL2, TF-1, Mo7e and CMK.

[0054] The activity of a protein of the invention may, among other means, be measured by the following methods:

[0055] Assays for T-cell or thymocyte proliferation include without limitation those described in: Current Protocols in Immunology, Ed by J. E. Coligan, A. M. Kruisbeek, D. H. Margulies, E. M. Shevach, W Strober, Pub. Greene Publishing Associates and Wiley-Interscience (Chapter 3, In Vitro assays for Mouse Lymphocyte Function 3.1-3.19; Chapter 7, Immunologic studies in Humans); Takai et al., J. Immunol. 137:3494-3500, 1986; Bertagnolli et al., J. Immunol. 145:1706-1712, 1990; Bertagnolli et al., Cellular Immunology 133:327-341, 1991; Bertagnolli, et al., J. Immunol. 149:3778-3783, 1992; Bowman et al., J. Immunol. 152: 1756-1761, 1994.

[0056] Assays for cytokine production and/or proliferation of spleen cells, lymph node cells or thymocytes include, without limitation, those described in: Polyclonal T cell stimulation, Kruisbeek, A. M. and Shevach, E. M. In Current Protocols in Immunology. J.E.e.a. Coligan eds. Vol 1 pp. 3.12.1-3.12.14, John Wiley and Sons, Toronto. 1994; and Measurement of mouse and human Interferon γ, Schreiber, R. D. In Current Protocols in Immunology. J.E.e.a. Coligan eds. Vol 1 pp. 6.8.1-6.8.8, John Wiley and Sons, Toronto. 1994.

[0057] Assays for proliferation and differentiation of hematopoietic and lymphopoietic cells include, without limitation, those described in: Measurement of Human and Murine Interleukin 2 and Interleukin 4, Bottomly, K., Davis, L. S. and Lipsky, P. E. In Current Protocols in Immunology. J.E.e.a. Coligan eds. Vol I pp. 6.3.1-6.3.12, John Wiley and Sons, Toronto. 1991; deVries et al., J. Exp. Med. 173:1205-1211, 1991; Moreau et al., Nature 336:690-692, 1988; Greenberger et al., Proc. Natl. Acad. Sci. U.S.A. 80:2931-2938, 1983; Measurement of mouse and human interleukin 6—Nordan, R. In Current Protocols in Immunology. J.E.e.a. Coligan eds. Vol 1 pp. 6.6.1-6.6.5, John Wiley and Sons, Toronto. 1991; Smith et al., Proc. Natl. Acad. Sci. U.S.A. 83:1857-1861, 1986; Measurement of human Interleukin 11—Bennett, F., Giannotti, J., Clark, S. C. and Turner, K. J. In Current Protocols in Immunology. J.E.e.a. Coligan eds. Vol I pp. 6.15.1 John Wiley and Sons, Toronto. 1991; Measurement of mouse and human Interleukin 9—Ciarletta, A., Giannotti, J.. Clark, S. C. and Turner, K. J. In Current Protocols in Immunology. J.E.e.a. Coligan eds. Vol 1 pp. 6.13.1, John Wiley and Sons, Toronto. 1991.

[0058] Assays for T-cell clone responses to antigens (which will identify, among others, proteins that affect APC-T cell interactions as well as direct T-cell effects by measuring proliferation and cytokine production) include, without limitation, those described in: Current Protocols in Immunology, Ed by J. E. Coligan, A. M. Kruisbeek, D. H. Margulies, E. M. Shevach, W Strober, Pub. Greene Publishing Associates and Wiley-Interscience (Chapter 3, In Vitro assays for Mouse Lymphocyte Function; Chapter 6, Cytokines and their cellular receptors; Chapter 7, Immunologic studies in Humans); Weinberger et al., Proc. Natl. Acad. Sci. USA 77:6091-6095, 1980; Weinberger et al., Eur. J. Immun. 11:405-411, 1981; Takai et al., J. Immunol. 137:3494-3500, 1986; Takai et al., J. Immunol. 140:508-512, 1988.

[0059] Immune Stimulating or Suppressing Activity

[0060] A protein of the present invention may also exhibit immune stimulating or immune suppressing activity, including without limitation the activities for which assays are described herein. A protein may be useful in the treatment of various immune deficiencies and disorders (including severe combined immunodeficiency (SCID)), e.g., in regulating (up or down) growth and proliferation of T and/or B lymphocytes, as well as effecting the cytolytic activity of NK cells and other cell populations. These immune deficiencies may be genetic or be caused by viral (e.g., HIV) as well as bacterial or fungal infections, or may result from autoimmune disorders. More specifically, infectious diseases causes by viral, bacterial, fungal or other infection may be treatable using a protein of the present invention, including infections by HIV, hepatitis viruses, herpesviruses, mycobacteria, Leishmania spp., malaria spp. and various fungal infections such as candidiasis. Of course, in this regard, a protein of the present invention may also be useful where a boost to the immune system generally may be desirable, i.e., in the treatment of cancer.

[0061] Autoimmune disorders which may be treated using a protein of the present invention include, for example, connective tissue disease, multiple sclerosis, systemic lupus erythematosus, rheumatoid arthritis, autoimmune pulmonary inflammation, Guillain-Barre syndrome, autoimmune thyroiditis, insulin dependent diabetes mellitis, myasthenia gravis, graft-versus-host disease and autoimmune inflammatory eye disease. Such a protein of the present invention may also to be useful in the treatment of allergic reactions and conditions, such as asthma (particularly allergic asthma) or other respiratory problems. Other conditions, in which immune suppression is desired (including, for example, organ transplantation), may also be treatable using a protein of the present invention.

[0062] Using the proteins of the invention it may also be possible to immune responses, in a number of ways. Down regulation may be in the form of inhibiting or blocking an immune response already in progress or may involve preventing the induction of an immune response. The functions of activated T cells may be inhibited by suppressing T cell responses or by inducing specific tolerance in T cells, or both. Immunosuppression of T cell responses is generally an active, non-antigen-specific, process which requires continuous exposure of the T cells to the suppressive agent. Tolerance, which involves inducing non-responsiveness or anergy in T cells, is distinguishable from immunosuppression in that it is generally antigen-specific and persists after exposure to the tolerizing agent has ceased. Operationally, tolerance can be demonstrated by the lack of a T cell response upon reexposure to specific antigen in the absence of the tolerizing agent.

[0063] Down regulating or preventing one or more antigen functions (including without limitation B lymphocyte antigen functions (such as, for example, B7)), e.g., preventing high level lymphokine synthesis by activated T cells, will be useful in situations of tissue, skin and organ transplantation and in graft-versus-host disease (GVHD). For example, blockage of T cell function should result in reduced tissue destruction in tissue transplantation. Typically, in tissue transplants, rejection of the transplant is initiated through its recognition as foreign by T cells, followed by an immune reaction that destroys the transplant. The administration of a molecule which inhibits or blocks interaction of a B7 lymphocyte antigen with its natural ligand(s) on immune cells (such as a soluble, monomeric form of a peptide having B7-2 activity alone or in conjunction with a monomeric form of a peptide having an activity of another B lymphocyte antigen (e.g., B7-1, B7-3) or blocking antibody), prior to transplantation can lead to the binding of the molecule to the natural ligand(s) on the immune cells without transmitting the corresponding costimulatory signal. Blocking B lymphocyte antigen function in this matter prevents cytokine synthesis by immune cells, such as T cells, and thus acts as an immunosuppressant Moreover, the lack of costimulation may also be sufficient to anergize the T cells, thereby inducing tolerance in a subject. Induction of long-term tolerance by B lymphocyte antigen-blocking reagents may avoid the necessity of repeated administration of these blocking reagents. To achieve sufficient immunosuppression or tolerance in a subject, it may also be necessary to block the function of a combination of B lymphocyte antigens.

[0064] The efficacy of particular blocking reagents in preventing organ transplant rejection or GVHD can be assessed using animal models that are predictive of efficacy in humans. Examples of appropriate systems which can be used include allogeneic cardiac grafts in rats and xenogeneic pancreatic islet cell grafts in mice, both of which have been used to examine the immunosuppressive effects of CTLA41g fusion proteins in vivo as described in Lenschow et al., Science 257:789-792 (1992) and Turka et al., Proc. Natl. Acad. Sci USA, 89:11102-11105 (1992). In addition, murine models of GVHD (see Paul ed., Fundamental Immunology, Raven Press, New York, 1989, pp. 846-847) can be used to determine the effect of blocking B lymphocyte antigen function in vivo on the development of that disease.

[0065] Blocking antigen function may also be therapeutically useful for treating autoimmune diseases. Many autoimmune disorders are the result of inappropriate activation of T cells that are reactive against self tissue and which promote the production of cytokines and autoantibodies involved in the pathology of the diseases. Preventing the activation of autoreactive T cells may reduce or eliminate disease symptoms. Administration of reagents which block costimulation of T cells by disrupting receptor:ligand interactions of B lymphocyte antigens can be used to inhibit T cell activation and prevent production of autoantibodies or T cell-derived cytokines which may be involved in the disease process. Additionally, blocking reagents may induce antigen-specific tolerance of autoreactive T cells which could lead to long-term relief from the disease. The efficacy of blocking reagents in preventing or alleviating autoimmune disorders can be determined using a number of well-characterized animal models of human autoimmune diseases. Examples include murine experimental autoimmune encephalitis, systemic lupus erythmatosis in MRL/lpr/lpr mice or NZB hybrid mice, murine autoimmune collagen arthritis, diabetes mellitus in NOD mice and BB rats, and murine experimental myasthenia gravis (see Paul ed., Fundamental Immunology, Raven Press, New York, 1989, pp. 840-856).

[0066] Upregulation of an antigen function (preferably a B lymphocyte antigen function), as a means of up regulating immune responses, may also be useful in therapy. Upregulation of immune responses may be in the form of enhancing an existing immune response or eliciting an initial immune response. For example, enhancing an immune response through stimulating B lymphocyte antigen function may be useful in cases of viral infection. In addition, systemic viral diseases such as influenza, the common cold, and encephalitis might be alleviated by the administration of stimulatory forms of B lymphocyte antigens systemically.

[0067] Alternatively, anti-viral immune responses may be enhanced in an infected patient by removing T cells from the patient, costimulating the T cells in vitro with viral antigen-pulsed APCs either expressing a peptide of the present invention or together with a stimulatory form of a soluble peptide of the present invention and reintroducirg the in vitro activated T cells into the patient. Another method of enhancing anti-viral immune responses would be to isolate infected cells from a patient, transfect them with a nucleic acid encoding a protein of the present invention as described herein such that the cells express all or a portion of the protein on their surface, and reintroduce the transfected cells into the patient. The infected cells would now be capable of delivering a costimulatory signal to, and thereby activate, T cells in vivo.

[0068] In another application, up regulation or enhancement of antigen function (preferably B lymphocyte antigen function) may be useful in the induction of tumor immunity. Tumor cells (e.g., sarcoma, melanoma, lymphoma, leukemia, neuroblastoma, carcinoma) transfected with a nucleic acid encoding at least one peptide of the present invention can be administered to a subject to overcome tumor-specific tolerance in the subject. If desired, the tumor cell can be transfected to express a combination of peptides. For example, tumor cells obtained from a patient can be transfected ex vivo with an expression vector directing the expression of a peptide having B7-2-like activity alone, or in conjunction with a peptide having B7-1-like activity and/or B7-3-like activity. The transfected tumor cells are returned to the patient to result in expression of the peptides on the surface of the transfected cell. Alternatively, gene therapy techniques can be used to target a tumor cell for transfection in vivo.

[0069] The presence of the peptide of the present invention having the activity of a B lymphocyte antigen(s) on the surface of the tumor cell provides the necessary costimulation signal to T cells to induce a T cell mediated immune response against the transfected tumor cells. In addition, tumor cells which lack MHC class I or MHC class II molecules, or which fail to reexpress sufficient amounts of MHC class I or MHC class II molecules, can be transfected with nucleic acid encoding all or a portion of (e.g., a cytoplasmic-domain truncated portion) of an MHC class I α chain protein and β₂ microglobulin protein or an MHC class II α chain protein and an MHC class II β chain protein to thereby express MHC class I or MHC class II proteins on the cell surface. Expression of the appropriate class I or class II MHC in conjunction with a peptide having the activity of a B lymphocyte antigen (e.g., B7-1, B7-2, B7-3) induces a T cell mediated immune response against the transfected tumor cell. Optionally, a gene encoding an antisense construct which blocks expression of an MHC class II associated protein, such as the invariant chain, can also be cotransfected with a DNA encoding a peptide having the activity of a B lymphocyte antigen to promote presentation of tumor associated antigens and induce tumor specific immunity. Thus, the induction of a T cell mediated immune response in a human subject may be sufficient to overcome tumor-specific tolerance in the subject.

[0070] The activity of a protein of the invention may, among other means, be measured by the following methods:

[0071] Suitable assays for thymocyte or splenocyte cytotoxicity include, without limitation, those described in: Current Protocols in Immunology, Ed by J. E. Coligan, A. M. Kruisbeek, D. H. Margulies, E. M. Shevach, W Strober, Pub. Greene Publishing Associates and Wiley-lnterscience (Chapter 3, In Vitro assays for Mouse Lymphocyte Function 3.1-3.19; Chapter 7, Immunologic studies in Humans); Herrmann et al., Proc. Natl. Acad. Sci. USA 78:2488-2492, 1981; Herrmann et al., J. Immunol. 128:1968-1974, 1982; Handa et al., J. Immunol. 135:1564-1572, 1985; Takai et al., J. Immunol. 137:3494-3500, 1986; Takai et al., J. Immunol. 140:508-512, 1988; Herrmann et al., Proc. Natl. Acad. Sci. USA 78:2488-2492, 1981; Herrmann et al., J. Immunol. 128:1968-1974, 1982; Handa et al., J. Immunol. 135:1564-1572, 1985; Takai et al., J. Immunol. 137:3494-3500, 1986; Bowmanet al., J. Virology 61:1992-1998; Takai et al., J. Immunol. 140:508-512, 1988; Bertagnolli et al., Cellular Immunology 133:327-341, 1991; Brown et al., J. Immunol. 153:3079-3092, 1994.

[0072] Assays for T-cell-dependent immunoglobulin responses and isotype switching (which will identify, among others, proteins that modulate T-cell dependent antibody responses and that affect Th1/Th2 profiles) include, without limitation, those described in: Maliszewski, J. Immunol. 144:3028-3033, 1990; and Assays for B cell function: In vitro antibody production, Mond, J. J. and Brunswick, M. In Current Protocols in Immunology. J.E.e.a. Coligan eds. Vol 1 pp. 3.8.1-3.8.16, John Wiley and Sons, Toronto. 1994.

[0073] Mixed lymphocyte reaction (MLR) assays (which will identify, among others, proteins that generate predominantly Th1 and CTL responses) include, without limitation, those described in: Current Protocols in Immunology, Ed by J. E. Coligan, A. M. Kruisbeek, D. H. Margulies, E. M. Shevach, W Strober, Pub. Greene Publishing Associates and Wiley-Interscience (Chapter 3, In Vitro assays for Mouse Lymphocyte Function 3.1-3.19; Chapter 7, Immunologic studies in Humans); Takai et al.. J. Immunol. 137:3494-3500, 1986; Takai et al., J. Immunol. 140:508-512, 1988; Bertagnolli et al., J. Immunol. 149:3778-3783, 1992.

[0074] Dendritic cell-dependent assays (which will identify, among others, proteins expressed by dendritic cells that activate naive T-cells) include, without limitation, those described in: Guery et al., J. Immunol. 134:536-544, 1995; Inaba et al., Journal of Experimental Medicine 173:549-559, 1991; Macatonia et al., Journal of Immunology 154:5071-5079, 1995; Porgador et al., Journal of Experimental Medicine 182:255-260, 1995; Nair et al., Journal of Virology 67:4062-4069, 1993; Huang et al., Science 264:961-965, 1994; Macatonia et al., Journal of Experimental Medicine 169:1255-1264, 1989; Bhardwaj et al., Journal of Clinical Investigation 94:797-807, 1994; and Inaba et al., Journal of Experimental Medicine 172:631-640, 1990.

[0075] Assays for lymphocyte survival/apoptosis (which will identify, among others, proteins that prevent apoptosis after superantigen induction and proteins that regulate lymphocyte homeostasis) include, without limitation, those described in: Darzynkiewicz et al., Cytometry 13:795-808, 1992; Gorczyca et al., Leukemia 7:659-670, 1993; Gorczyca et al., Cancer Research 53:1945-1951, 1993; Itoh et al., Cell 66:233-243, 1991; Zacharchuk, Journal of Immunology 145:4037-4045, 1990; Zamai et al., Cytometry 14:891-897, 1993; Gorczyca et al., International Journal of Oncology 1:639-648, 1992.

[0076] Assays for proteins that influence early steps of T-cell commitment and development include, without limitation, those described in: Antica et al., Blood 84:111-117, 1994; Fine et al., Cellular Immunology 155:111-122, 1994; Galy et al., Blood 85:2770-2778, 1995; Toki et al., Proc. Nat. Acad Sci. USA 88:7548-7551, 1991.

[0077] Hematopoiesis Regulating Activity

[0078] A protein of the present invention may be useful in regulation of hematopoiesis and, consequently, in the treatment of myeloid or lymphoid cell deficiencies. Even marginal biological activity in support of colony forming cells or of factor-dependent cell lines indicates involvement in regulating hematopoiesis, e.g. in supporting the growth and proliferation of erythroid progenitor cells alone or in combination with other cytokines, thereby indicating utility, for example, in treating various anemias or for use in conjunction with irradiation/chemotherapy to stimulate the production of erythroid precursors and/or erythroid cells; in supporting the growth and proliferation of myeloid cells such as granulocytes and monocytes/macrophages (i.e., traditional CSF activity) useful, for example, in conjunction with chemotherapy to prevent or treat consequent myelo-suppression; in supporting the growth and proliferation of megakaryocytes and consequently of platelets thereby allowing prevention or treatment of various platelet disorders such as thrombocytopenia, and generally for use in place of or complimentary to platelet transfusions; and/or in supporting the growth and proliferation of hematopoietic stem cells which are capable of maturing to any and all of the above-mentioned hematopoietic cells and therefore find therapeutic utility in various stem cell disorders (such as those usually treated with transplantation, including, without limitation, aplastic anemia and paroxysmal nocturnal hemoglobinuria), as well as in repopulating the stem cell compartment post irradiation/chemotherapy, either in-vivo or ex-vivo (i.e., in conjunction with bone marrow transplantation or with peripheral progenitor cell transplantation (homologous or heterologous)) as normal cells or genetically manipulated for gene therapy.

[0079] The activity of a protein of the invention may, among other means, be measured by the following methods:

[0080] Suitable assays for proliferation and differentiation of various hematopoietic lines are cited above.

[0081] Assays for embryonic stem cell differentiation (which will identify, among others, proteins that influence embryonic differentiation hematopoiesis) include, without limitation, those described in: Johansson et al. Cellular Biology 15:141-151, 1995; Keller et al., Molecular and Cellular Biology 13:473-486, 1993; McClanahan et al., Blood 81:2903-2915, 1993.

[0082] Assays for stem cell survival and differentiation (which will identify, among others, proteins that regulate lympho-hematopoiesis) include, without limitation, those described in: Methylcellulose colony forming assays, Freshney, M. G. In Culture of Hematopoietic Cells. R. I. Freshney, et al. eds. Vol pp. 265-268, Wiley-Liss, Inc., New York, N.Y. 1994; Hirayama et al., Proc. Natl. Acad. Sci. USA 89:5907-5911, 1992; Primitive hematopoietic colony forming cells with high proliferative potential, McNiece, I. K. and Briddell, R. A. In Culture of Hematopoietic Cells. R. I. Freshney, et al. eds. Vol pp. 23-39, Wiley-Liss, Inc., New York, N,Y. 1994; Neben et al., Experimental Hematology 22:353-359, 1994; Cobblestone area forming cell assay, Ploemacher, R. E. In Culture of Hematopoietic Cells. R. I. Freshney, et al. eds. Vol pp. 1-21, Wiley-Liss, Inc.., New York, N.Y. 1994; Long term bone marrow cultures in the presence of stromal cells, Spooncer, E., Dexter, M. and Allen, T. In Culture of Hematopoietic Cells. R. I. Freshney, et al. eds. Vol pp. 163-179, Wiley-Liss, Inc., New York, N.Y. 1994; Long term culture initiating cell assay, Sutherland, H. J. In Culture of Hematopoietic Cells. R. I. Freshney. et al. eds. Vol pp. 139-162, Wiley-Liss, Inc., New York, N.Y. 1994.

[0083] Tissue Growth Activity

[0084] A protein of the present invention also may have utility in compositions used for bone, cartilage, tendon, ligament and/or nerve tissue growth or regeneration, as well as for wound healing and tissue repair and replacement, and in the treatment of burns, incisions and ulcers.

[0085] A protein of the present invention, which induces cartilage and/or bone growth in circumstances where bone is not normally formed, has application in the healing of bone fractures and cartilage damage or defects in humans and other animals. Such a preparation employing a protein of the invention may have prophylactic use in closed as well as open fracture reduction and also in the improved fixation of artificial joints. De novo bone formation induced by an osteogenic agent contributes to the repair of congenital, trauma induced, or oncologic resection induced craniofacial defects, and also is useful in cosmetic plastic surgery.

[0086] A protein of this invention may also be used in the treatment of periodontal disease, and in other tooth repair processes. Such agents may provide an environment to attract bone-forming cells, stimulate growth of bone-forming cells or induce differentiation of progenitors of bone-forming cells. A protein of the invention may also be useful in the treatment of osteoporosis or osteoarthritis, such as through stimulation of bone and/or cartilage repair or by blocking inflammation or processes of tissue destruction (collagenase activity, osteoclast activity, etc.) mediated by inflammatory processes.

[0087] Another category of tissue regeneration activity that may be attributable to the protein of the present invention is tendon/ligament formation. A protein of the present invention, which induces tendon/ligament-like tissue or other tissue formation in circumstances where such tissue is not normally formed, has application in the healing of tendon or ligament tears, deformities and other tendon or ligament defects in humans and other animals. Such a preparation employing a tendon/ligament-like tissue inducing protein may have prophylactic use in preventing damage to tendon or ligament tissue, as well as use in the improved fixation of tendon or ligament to bone or other tissues, and in repairing defects to tendon or ligament tissue. De novo tendon/ligament-like tissue formation induced by a composition of the present invention contributes to the repair of congenital, trauma induced, or other tendon or ligament defects of other origin, and is also useful in cosmetic plastic surgery for attachment or repair of tendons or ligaments. The compositions of the present invention may provide an environment to attract tendon- or ligamert-forming cells, stimulate growth of tendon- or ligament-forming cells, induce differentiation of progenitors of tendon- or ligament-forming cells, or induce growth of tendon/ligament cells or progenitors ex vivo for return in vivo to effect tissue repair. The compositions of the invention may also be useful in the treatment of tendinitis, carpal tunnel syndrome and other tendon or ligament defects. The compositions may also include an appropriate matrix and/or sequestering agent as a carrier as is well known in the art.

[0088] The protein of the present invention may also be useful for proliferation of neural cells and for regeneration of nerve and brain tissue, i.e. for the treatment of central and peripheral nervous system diseases and neuropathies, as well as mechanical and traumatic disorders, which involve degeneration, death or trauma to neural cells or nerve tissue. More specifically, a protein may be used in the treatment of diseases of the peripheral nervous system, such as peripheral nerve injuries, peripheral neuropathy and localized neuropathies, and central nervous system diseases, such as Alzheimer's, Parkinson's disease, Huntington's disease, amyotrophic lateral sclerosis, and Shy-Drager syndrome. Further conditions which may be treated in accordance with the present invention include mechanical and traumatic disorders, such as spinal cord disorders, head trauma and cerebrovascular diseases such as stroke. Peripheral neuropathies resulting from chemotherapy or other medical therapies may also be treatable using a protein of the invention.

[0089] Proteins of the invention may also be useful to promote better or faster closure of non-healing wounds, including without limitation pressure ulcers, ulcers associated with vascular insufficiency, surgical and traumatic wounds, and the like.

[0090] It is expected that a protein of the present invention may also exhibit activity for generation or regeneration of other tissues, such as organs (including, for example, pancreas, liver, intestine, kidney, skin, endothelium), muscle (smooth, skeletal or cardiac) and vascular (including vascular endothelium) tissue, or for promoting the growth of cells comprising such tissues. Part of the desired effects may be by inhibition or modulation of fibrotic scarring to allow normal tissue to regenerate. A protein of the invention may also exhibit angiogenic activity.

[0091] A protein of the present invention may also be useful for gut protection or regeneration and treatment of lung or liver fibrosis, reperfusion injury in various tissues, and conditions resulting from systemic cytokine damage.

[0092] A protein of the present invention may also be useful for promoting or inhibiting differentiation of tissues described above from precursor tissues or cells; or for inhibiting the growth of tissues described above.

[0093] The activity of a protein of the invention may, among other means, be measured by the following methods:

[0094] Assays for tissue generation activity include, without limitation, those described in: International Patent Publication No. WO95/16035 (bone, cartilage, tendon); International Patent Publication No. WO95/05846 (nerve, neuronal); International Patent Publication No. WO91/07491 (skin, endothelium).

[0095] Assays for wound healing activity include, without limitation, those described in: Winter, Epidermal Wound Healing, pps. 71-112 (Maibach, H I and Rovee, D T, eds.), Year Book Medical Publishers, Inc., Chicago, as modified by Eaglstein and Mertz, J. Invest. Dermatol 71:382-84 (1978).

[0096] Activin/Inhibin Activity

[0097] A protein of the present invention may also exhibit activin- or inhibin-related activities. Inhibins are characterized by their ability to inhibit the release of follicle stimulating hormone (FSH), while activins and are characterized by their ability to stimulate the release of follicle stimulating hormone (FSH). Thus, a protein of the present invention, alone or in heterodimers with a member of the inhibin a family, may be useful as a contraceptive based on the ability of inhibins to decrease fertility in female mammals and decrease spermatogenesis in male mammals. Administration of sufficient amounts of other inhibins can induce infertility in these mammals. Alternatively, the protein of the invention, as a homodimer or as a heterodimer with other protein subunits of the inhibin-β group, may be useful as a fertility inducing therapeutic, based upon the ability of activin molecules in stimulating FSH release from cells of the anterior pituitary. See, for example, U.S. Pat. No. 4,798,885. A protein of the invention may also be useful for advancement of the onset of fertility in sexually immature mammals, so as to increase the lifetime reproductive performance of domestic animals such as cows, sheep and pigs.

[0098] The activity of a protein of the invention may, among other means, be measured by the following methods:

[0099] Assays for activin/inhibin activity include, without limitation, those described in: Vale et al., Endocrinology 91:562-572, 1972; Ling et al., Nature 321:779-782, 1986; Vale

[0100] A protein of the invention may also exhibit hemostatic or thrombolytic activity. As a result, such a protein is expected to be useful in treatment of various coagulation disorders (including hereditary disorders, such as hemophilias) or to enhance coagulation and other hemostatic events in treating wounds resulting from trauma, surgery or other causes. A protein of the invention may also be useful for dissolving or inhibiting formation of thromboses and for treatment and prevention of conditions resulting therefrom (such as, for example, infarction of cardiac and central nervous system vessels (e.g.. stroke).

[0101] The activity of a protein of the invention may, among other means, be measured by the following methods:

[0102] Assay for hemostatic and thrombolytic activity include, without limitation, those described in: Linet et al., J. Clin. Pharmacol. 26:131-140, 1986; Burdick et al., Thrombosis Res. 45:413-419, 1987; Humphrey et al., Fibrinolysis 5:71-79 (1991); Schaub, Prostaglandins 35:467-474, 1988.

[0103] Receptor/Ligand Activity

[0104] A protein of the present invention may also demonstrate activity as receptors, receptor ligands or inhibitors or agonists of receptor/ligand interactions. Examples of such receptors and ligands include, without limitation, cytokine receptors and their ligands, receptor kinases and their ligands, receptor phosphatases and their ligands, receptors involved in cell-cell interactions and their ligands (including without limitation, cellular adhesion molecules (such as selecting, integrins and their ligands) and receptor/ligand pairs involved in antigen presentation, antigen recognition and development of cellular and humoral immune responses). Receptors and ligands are also useful for screening of potential peptide or small molecule inhibitors of the relevant receptor/ligand interaction. A protein of the present invention (including, without limitation, fragments of receptors and ligands) may themselves be useful as inhibitors of receptor/ligand interactions.

[0105] The activity of a protein of the invention may, among other means, be measured by the following methods:

[0106] Suitable assays for receptor-ligand activity include without limitation those described in: Current Protocols in Immunology, Ed by J. E. Coligan, A. M. Kruisbeek, D. H. Margulies, E. M. Shevach, W. Strober, Pub. Greene Publishing Associates and Wiley-lnterscience (Chapter 7.28, Measurement of Cellular Adhesion under static conditions 7.28.1-7.28.22), Takai et al., Proc. Natl. Acad. Sci. USA 84:6864-6868, 1987; Bierer et al., J. Exp. Med. 168:1145-1156, 1988; Rosenstein et al., J. Exp. Med. et al., Nature 321:776-779, 1986; Mason et al., Nature 318:659-663, 1985; Forage et al., Proc. Natl. Acad. Sci. USA 83:3091-3095, 1986.

[0107] Chemotactic/Chemokinetic Activity

[0108] A protein of the present invention may have chemotactic or chemokinetic activity (e.g., act as a chemokine) for mammalian cells, including, for example, monocytes, fibroblasts, neutrophils, T-cells, mast cells, eosinophils, epithelial and/or endothelial cells. Chemotactic and chemokinetic proteins can be used to mobilize or attract a desired cell population to a desired site of action. Chemotactic or chemokinetic proteins provide particular advantages in treatment of wounds and other trauma to tissues, as well as in treatment of localized infections. For example, attraction of lymphocytes, monocytes or neutrophils to tumors or sites of infection may result in improved immune responses against the tumor or infecting agent.

[0109] A protein or peptide has chemotactic activity for a particular cell population if it can stimulate, directly or indirectly, the directed orientation or movement of such cell population. Preferably, the protein or peptide has the ability to directly stimulate directed movement of cells. Whether a particular protein has chemotactic activity for a population of cells can be readily determined by employing such protein or peptide in any known assay for cell chemotaxis.

[0110] The activity of a protein of the invention may, among other means, be measured by the following methods:

[0111] Assays for chemotactic activity (which will identify proteins that induce or prevent chemotaxis) consist of assays that measure the ability of a protein to induce the migration of cells across a membrane as well as the ability of a protein to induce the adhesion of one cell population to another cell population. Suitable assays for movement and adhesion include, without limitation, those described in: Current Protocols in Immunology, Ed by J. E. Coligan, A. M. Kruisbeek, D. H. Margulies, E. M. Shevach, W. Strober, Pub. Greene Publishing Associates and Wiley-Interscience (Chapter 6.12, Measurement of alpha and beta Chemokines 6.12.1-6.12.28;Taubetal. J. Clin. Invest. 95:1370-1376, 1995; Lind et al. APMIS 103: 140-146, 1995; Muller et al Eur. J. Immunol. 25: 1744-1748; Gruber et al. J. of Immunol. 152:5860-5867, 1994; Johnston et al. J. of Immunol. 153: 1762-1768, 1994.

[0112] Hemostatic and Thrombolytic Activity

[0113] 169:149-160 1989; Stoltenborg et al., J. Immunol. Methods 175:59-68, 1994; Stitt et al., Cell 80:661-670, 1995.

[0114] Anti-Inflammatory Activity

[0115] Proteins of the present invention may also exhibit anti-inflammatory activity. The anti-inflammatory activity may be achieved by providing a stimulus to cells involved in the inflammatory response, by inhibiting or promoting cell-cell interactions (such as, for example, cell adhesion), by inhibiting or promoting chemotaxis of cells involved in the inflammatory process, inhibiting or promoting cell extravasation, or by stimulating or suppressing production of other factors which more directly inhibit or promote an inflammatory response. Proteins exhibiting such activities can be used to treat inflammatory conditions including chronic or acute conditions), including without limitation inflammation associated with infection (such as septic shock, sepsis or systemic inflammatory response syndrome (SIRS)), ischemia-reperfusion injury, endotoxin lethality, arthritis, complement-mediated hyperacute rejection, nephritis, cytokine or chemokine-induced lung injury, inflammatory bowel disease, Crohn's disease or resulting from over production of cytokines such as TNF or IL-1. Proteins of the invention may also be useful to treat anaphylaxis and hypersensitivity to an antigenic substance or material.

[0116] Tumor Inhibition Activity

[0117] In addition to the activities described above for immunological treatment or prevention of tumors, a protein of the invention may exhibit other anti-tumor activities. A protein may inhibit tumor growth directly or indirectly (such as, for example, via ADCC).

[0118] A protein may exhibit its tumor inhibitory activity by acting on tumor tissue or tumor precursor tissue, by inhibiting formation of tissues necessary to support tumor growth (such as, for example, by inhibiting angiogenesis), by causing production of other factors, agents or cell types which inhibit tumor growth, or by suppressing, eliminating or inhibiting factors, agents or cell types which promote tumor growth.

[0119] Other Activities

[0120] A protein of the invention may also exhibit one or more of the following additional activities or effects: inhibiting the growth, infection or function of, or killing, infectious agents, including, without limitation, bacteria, viruses, fungi and other parasites; effecting (suppressing or enhancing) bodily characteristics, including, without limitation, height, weight, hair color, eye color, skin, fat to lean ratio or other tissue pigmentation, or organ or body part size or shape (such as, for example, breast augmentation or diminution, change in bone form or shape); effecting biorhythms or caricadic cycles or rhythms; effecting the fertility of male or female subjects; effecting the metabolism, catabolism, anabolism, processing, utilization, storage or elimination of dietary fat, lipid, protein, carbohydrate, vitamins, minerals, cofactors or other nutritional factors or component(s); effecting behavioral characteristics, including, without limitation, appetite, libido, stress, cognition (including cognitive disorders), depression (including depressive disorders) and violent behaviors; providing analgesic effects or other pain reducing effects; promoting differentiation and growth of embryonic stem cells in lineages other than hematopoietic lineages; hormonal or endocrine activity; in the case of enzymes, correcting deficiencies of the enzyme and treating deficiency-related diseases; treatment of hyperproliferative disorders (such as, for example, psoriasis); immunoglobulin-like activity (such as, for example, the ability to bind antigens or complement); and the ability to act as an antigen in a vaccine composition to raise an immune response against such protein or another material or entity which is cross-reactive with such protein.

### ADMINISTRATION AND DOSING

[0121] A protein of the present invention (from whatever source derived, including without limitation from recombinant and non-recombinant sources) may be used in a pharmaceutical composition when combined with a pharmaceutically acceptable carrier. Such a composition may also contain (in addition to protein and a carrier) diluents, fillers, salts, buffers, stabilizers, solubilizers, and other materials well known in the art. The term “pharmaceutically acceptable” means a non-toxic material that does not interfere with the effectiveness of the biological activity of the active ingredient(s). The characteristics of the carrier will depend on the route of administration. The pharmaceutical composition of the invention may also contain cytokines, lymphokines, or other hematopoietic factors such as M-CSF, GM-CSF, TNF, IL-1, IL-2, IL-3, IL4, IL-5, IL-6, IL-7, IL-8, IL-9, IL-10, IL-11, IL-12, IL-13, IL-14, IL-15, IFN, TNF0, TNF1, TNF2, G-CSF, Meg-CSF, thrombopoietin, stem cell factor, and erythropoietin. The pharmaceutical composition may further contain other agents which either enhance the activity of the protein or compliment its activity or use in treatment. Such additional factors and/or agents may be included in the pharmaceutical composition to produce a synergistic effect with protein of the invention, or to minimize side effects. Conversely, protein of the present invention may be included in formulations of the particular cytokine, lymphokine, other hematopoietic factor, thrombolytic or anti-thrombotic factor, or anti-inflammatory agent to minimize side effects of the cytokine, lymphokine, other hematopoietic factor, thrombolytic or anti-thrombotic factor, or anti-inflammatory agent.

[0122] A protein of the present invention may be active in multimers (e.g., heterodimers or homodimers) or complexes with itself or other proteins. As a result, pharmaceutical compositions of the invention may comprise a protein of the invention in such multimeric or complexed form.

[0123] The pharmaceutical composition of the invention may be in the form of a complex of the protein(s) of present invention along with protein or peptide antigens. The protein and/or peptide antigen will deliver a stimulatory signal to both B and T lymphocytes. B lymphocytes will respond to antigen through their surface immunoglobulin receptor. T lymphocytes will respond to antigen through the T cell receptor (TCR) following presentation of the antigen by MHC proteins. MHC and structurally related proteins including those encoded by class I and class II MHC genes on host cells will serve to present the peptide antigen(s) to T lymphocytes. The antigen components could also be supplied as purified MHC-peptide complexes alone or with co-stimulatory molecules that can directly signal T cells. Alternatively antibodies able to bind surface immunolgobulin and other molecules on B cells as well as antibodies able to bind the TCR and other molecules on T cells can be combined with the pharmaceutical composition of the invention.

[0124] The pharmaceutical composition of the invention may be in the form of a liposome in which protein of the present invention is combined, in addition to other pharmaceutically acceptable carriers, with amphipathic agents such as lipids which exist in aggregated form as micelles, insoluble monolayers, liquid crystals, or lamellar layers in aqueous solution. Suitable lipids for liposomal formulation include, without limitation, monoglycerides, diglycerides, sulfatides, lysolecithin, phospholipids, saponin, bile acids, and the like. Preparation of such liposomal formulations is within the level of skill in the art, as disclosed, for example, in U.S. Pat. No. 4,235,871; U.S. Pat. No. 4,501,728; U.S. Pat. No. 4,837,028; and U.S. Pat. No. 4,737,323, all of which are incorporated herein by reference.

[0125] As used herein, the term “therapeutically effective amount” means the total amount of each active component of the pharmaceutical composition or method that is sufficient to show a meaningful patient benefit, i.e., treatment, healing, prevention or amelioration of the relevant medical condition, or an increase in rate of treatment, healing, prevention or amelioration of such conditions. When applied to an individual active ingredient, administered alone, the term refers to that ingredient alone. When applied to a combination, the term refers to combined amounts of the active ingredients that result in the therapeutic effect, whether administered in combination, serially or simultaneously.

[0126] In practicing the method of treatment or use of the present invention, a therapeutically effective amount of protein of the present invention is administered to a mammal having a condition to be treated. Protein of the present invention may be administered in accordance with the method of the invention either alone or in combination with other therapies such as treatments employing cytokines, lymphokines or other hematopoietic factors. When co-administered with one or more cytokines, lymphokines or other hematopoietic factors, protein of the present invention may be administered either simultaneously with the cytokine(s), lymphokine(s), other hematopoietic factor(s), thrombolytic or anti-thrombotic factors, or sequentially. If administered sequentially, the attending physician will decide on the appropriate sequence of administering protein of the present invention in combination with cytokine(s), lymphokine(s), other hematopoietic factor(s), thrombolytic or anti-thrombotic factors.

[0127] Administration of protein of the present invention used in the pharmaceutical composition or to practice the method of the present invention can be carried out in a variety of conventional ways, such as oral ingestion, inhalation, topical application or cutaneous, subcutaneous, intraperitoneal, parenteral or intravenous injection. Intravenous administration to the patient is preferred.

[0128] When a therapeutically effective amount of protein of the present invention is administered orally, protein of the present invention will be in the form of a tablet, capsule, powder, solution or elixir. When administered in tablet form, the pharmaceutical composition of the invention may additionally contain a solid carrier such as a gelatin or an adjuvant. The tablet, capsule, and powder contain from about 5 to 95% protein of the present invention, and preferably from about 25 to 90% protein of the present invention. When administered in liquid form, a liquid carrier such as water, petroleum, oils of animal or plant origin such as peanut oil, mineral oil, soybean oil, or sesame oil, or synthetic oils may be added. The liquid form of the pharmaceutical composition may further contain physiological saline solution, dextrose or other saccharide solution, or glycols such as ethylene glycol, propylene glycol or polyethylene glycol. When administered in liquid form, the pharmaceutical composition contains from about 0.5 to 90% by weight of protein of the present invention, and preferably from about 1 to 50% protein of the present invention.

[0129] When a therapeutically effective amount of protein of the present invention is administered by intravenous, cutaneous or subcutaneous injection, protein of the present invention will be in the form of a pyrogen-free, parenterally acceptable aqueous solution. The preparation of such parenterally acceptable protein solutions, having due regard to pH, isotonicity, stability, and the like, is within the skill in the art. A preferred pharmaceutical composition for intravenous, cutaneous, or subcutaneous injection should contain, in addition to protein of the present invention, an isotonic vehicle such as Sodium Chloride Injection, Ringer's Injection, Dextrose Injection, Dextrose and Sodium Chloride Injection, Lactated Ringer's Injection, or other vehicle as known in the art. The pharmaceutical composition of the present invention may also contain stabilizers, preservatives, buffers, antioxidants, or other additives known to those of skill in the art.

[0130] The amount of protein of the present invention in the pharmaceutical composition of the present invention will depend upon the nature and severity of the condition being treated, and on the nature of prior treatments which the patient has undergone. Ultimately, the attending physician will decide the amount of protein of the present invention with which to treat each individual patient. Initially, the attending physician will administer low doses of protein of the present invention and observe the patient's response. Larger doses of protein of the present invention may be administered until the optimal therapeutic effect is obtained for the patient, and at that point the dosage is not increased further. It is contemplated that the various pharmaceutical compositions used to practice the method of the present invention should contain about 0.01 μg to about 100 mg (preferably about 0.1 ng to about 10 mg, more preferably about 0.1 μg to about 1 mg) of protein of the present invention per kg body weight.

[0131] The duration of intravenous therapy using the pharmaceutical composition of the present invention will vary, depending on the severity of the disease being treated and the condition and potential idiosyncratic response of each individual patient. It is contemplated that the duration of each application of the protein of the present invention will be in the range of 12 to 24 hours of continuous intravenous administration. Ultimately the attending physician will decide on the appropriate duration of intravenous therapy using the pharmaceutical composition of the present invention.

[0132] Protein of the invention may also be used to immunize animals to obtain polyclonal and monoclonal antibodies which specifically react with the protein. Such antibodies may be obtained using either the entire protein or fragments thereof as an immunogen. The peptide immunogens additionally may contain a cysteine residue at the carboxyl terminus, and are conjugated to a hapten such as keyhole limpet hemocyanin (KLH). Methods for synthesizing such peptides are known in the art, for example, as in R. P. Merrifield, J. Amer. Chem. Soc. 85, 2149-2154 (1963); J. L. Krstenansky, et al., FEBS Lett. 211, 10 (1987). Monoclonal antibodies binding to the protein of the invention may be useful diagnostic agents for the immunodetection of the protein. Neutralizing monoclonal antibodies binding to the protein may also be useful therapeutics for both conditions associated with the protein and also in the treatment of some forms of cancer where abnormal expression of the protein is involved. In the case of cancerous cells or leukemic cells, neutralizing monoclonal antibodies against the protein may be useful in detecting and preventing the metastatic spread of the cancerous cells, which may be mediated by the protein.

[0133] For compositions of the present invention which are useful for bone, cartilage, tendon or ligament regeneration, the therapeutic method includes administering the composition topically, systematically, or locally as an implant or device. When administered, the therapeutic composition for use in this invention is, of course, in a pyrogen-free, physiologically acceptable form. Further, the composition may desirably be encapsulated or injected in a viscous form for delivery to the site of bone, cartilage or tissue damage. Topical administration may be suitable for wound healing and tissue repair. Therapeutically useful agents other than a protein of the invention which may also optionally be included in the composition as described above, may alternatively or additionally, be administered simultaneously or sequentially with the composition in the methods of the invention. Preferably for bone and/or cartilage formation, the composition would include a matrix capable of delivering the protein-containing composition to the site of bone and/or cartilage damage, providing a structure for the developing bone and cartilage and optimally capable of being resorbed into the body. Such matrices may be formed of materials presently in use for other implanted medical applications.

[0134] The choice of matrix material is based on biocompatibility, biodegradability, mechanical properties, cosmetic appearance and interface properties. The particular application of the compositions will define the appropriate formulation. Potential matrices for the compositions may be biodegradable and chemically defined calcium sulfate, tricalciumphosphate, hydroxyapatite, polylactic acid, polyglycolic acid and polyanhydrides Other potential materials are biodegradable and biologically well-defined, such as bone or dermal collagen. Further matrices are comprised of pure proteins or extracellular matrix components. Other potential matrices are nonbiodegradable and chemically defined, such as sintered hydroxapatite, bioglass, aluminates, or other ceramics. Matrices may be comprised of combinations of any of the above mentioned types of material, such as polylactic acid and hydroxyapatite or collagen and tricalciumphosphate. The bioceramics may be altered in composition, such as in calcium-aluminate-phosphate and processing to alter pore size, particle size, particle shape, and biodegradability.

[0135] Presently preferred is a 50:50 (mole weight) copolymer of lactic acid and glycolic acid in the form of porous particles having diameters ranging from 150 to 800 microns. In some applications, it will be useful to utilize a sequestering agent, such as carboxymethyl cellulose or autologous blood clot, to prevent the protein compositions from disassociating from the matrix.

[0136] A preferred family of sequestering agents is cellulosic materials such as alkylcelluloses(including hydroxyalkylcelluloses), including methylcellulose, ethylcellulose, hydroxyethylcellulose, hydroxypropylcellulose, hydroxypropyl-methylcellulose, and carboxymethylcellulose, the most preferred being cationic salts of carboxymethylcellulose (CMC). Other preferred sequestering agents include hyaluronic acid, sodium alginate, poly(ethylene glycol), polyoxyethylene oxide, carboxyvinyl polymer and poly(vinyl alcohol). The amount of sequestering agent useful herein is 0.5-20 wt %, preferably 1-10 wt % based on total formulation weight, which represents the amount necessary to prevent desorbtion of the protein from the polymer matrix and to provide appropriate handling of the composition, yet not so much that the progenitor cells are prevented from infiltrating the matrix, thereby providing the protein the opportunity to assist the osteogenic activity of the progenitor cells.

[0137] In further compositions, proteins of the invention may be combined with other agents beneficial to the treatment of the bone and/or cartilage defect, wound, or tissue in question. These agents include various growth factors such as epidermal growth factor (EGF), platelet derived growth factor (PDGF), transforming growth factors (TGF-α and TGF-β), and insulin-like growth factor (IGF).

[0138] The therapeutic compositions are also presently valuable for veterinary applications. Particularly domestic animals and thoroughbred horses, in addition to humans, are desired patients for such treatment with proteins of the present invention.

[0139] The dosage regimen of a protein-containing pharmaceutical composition to be used in tissue regeneration will be determined by the attending physician considering various factors which modify the action of the proteins, e.g., amount of tissue weight desired to be formed, the site of damage, the condition of the damaged tissue, the size of a wound, type of damaged tissue (e.g., bone), the patient's age, sex, and diet, the severity of any infection, time of administration and other clinical factors. The dosage may vary with the type of matrix used in the reconstitution and with inclusion of other proteins in the pharmaceutical composition. For example, the addition of other known growth factors, such as IGF I (insulin like growth factor I), to the final composition, may also effect the dosage. Progress can be monitored by periodic assessment of tissue/bone growth and/or repair, for example, X-rays, histomorphometric determinations and tetracycline labeling.

[0140] Polynucleotides of the present invention can also be used for gene therapy. Such polynucleotides can be introduced either in vivo or ex vivo into cells for expression in a mammalian subject. Polynucleotides of the invention may also be administered by other known methods for introduction of nucleic acid into a cell or organism (including, without limitation, in the form of viral vectors or naked DNA).

[0141] Cells may also be cultured ex vivo in the presence of proteins of the present invention in order to proliferate or to produce a desired effect on or activity in such cells. Treated cells can then be introduced in vivo for therapeutic purposes.

[0142] Patent and literature references cited herein are incorporated by reference as if fully set forth.

TABLE 3

| Sel. | Species | Tissue | Cell Type |
|---|---|---|---|
| AA | Human | Kidney | 19-23 wks., M/F pool of 5 |
| AB | Human | Fetal Lung | Fetal Lung |
| AC | Human | Placenta | 26 yrs., 1 specimen |
| AD | Murine | Embryo | Fetal ES cells |
| AE | Murine | Spleen | Adult Spleen |
| AF | Murine | Fetal Brain | Fetal Brain |
| AG | Murine | Fetal Brain | Fetal Brain |
| AH | Murine | Fetal Thymus | Fetal Thymus |
| AI | Human | Blood | Adult PBMC/TH 1 or 2 |
| AJ | Human | Testes | 10-61 yrs., pool of 11 |
| AK | Human | Kidney | 19-23 wks., M/F pool of 5 |
| AL | Human | Neural | Adult Glioblastoma line TG-1 |
| AM | Human | Kidney | 19-23 wks., M/F pool of 5 |
| AN | Murine | Bone Marrow | Adult Stromal cell line FCM-4 |
| AO | Murine | Thymus | Adult Subtr. Adult Thymus |
| AP | Human | Placenta | 26 yrs., 1 specimen |
| AQ | Human | Ovary | PA 1 Teratocarcinoma |
| AR | Human | Retina | 16-75 yrs., pool of 76 |
| AS | Human | Brain | 19-23 wks., M/F pool of 5 |
| AT | Human | Blood | Adult lymphocytes + dend. cells |
| AU | Human | Testes | 10-61 yrs., pool of 11 |
| AV | Murine | Spleen | Adult Spleen |
| AW | Human | Ovary | PA-1 Teratocarcinoma |
| AX | Human | Testes | 10-61 yrs., pool of 11 |
| AY | Human | Retina | 16-75 yrs., pool of 76 |
| AZ | Human | Colon | Caco-2 Adenocarcinoma |
| B | Human | Blood | PeripheralBloodMononuclearCel |
| BA | Human | Placenta | 26 yrs., 1 specimen |
| BB | Human | Blood | Adult PBMC/TH 1 or 2 |
| BC | Murine | Embryo | Fetal ES cells |
| BD | Human | Kidney | 19-23 wks., M/F pool of 5 |
| BE | Human | Blood | Adult PBMC/TH 1 or 2 |
| BF | Human | Brain | 19-23 wks., M/F pool of 5 |
| BG | Human | Brain | N/A |
| BH | Human | Ovary | PA-1 Teratocarcinoma |
| BI | Human | Kidney | 19-23 wks., M/F pool of 5 |
| BJ | Human | Ovary | PA-1 Teratocarcinoma |
| BK | Human | Retina | 16-75 yrs., pool of 76 |
| BL | Human | Testes | 10-61 yrs., pool of 11 |
| BM | Human | Muscle | N/A |
| BN | Human | Placenta | 26 yrs., 1 specimen |
| BO | Human | Retina | 16-75 yrs., pool of 76 |
| BP | Human | Kidney | 19-23 wks., M/F pool of 5 |
| BQ | Human | Colon | Caco-2 Adenocarcinoma |
| BR | Human | Kidney | 19-23 wks., M/F pool of 5 |
| BS | Human | Pituitary | Adult Pituitary |
| BT | Human | Blood | Adult PBMC |
| BU | Human | Placenta | 26 yrs., 1 specimen |
| BV | Human | Brain | N/A |
| BW | Human | Blood | Adult PBMC |
| BX | Human | Ovary | PA-1 Teratocarcinoma |
| BY | Human | Blood | Adult PBMC/TH 1 or 2 |
| BZ | Human | Kidney | 19-23 wks., M/F pool of 5 |
| C | Human | Blood | PeripheralBloodMononuclearCel |
| CA | Human | Embryo | Fetal ES cell embryoid bodies |
| CB | Human | Brain | 19-23 wks., M/F pool of 5 |
| CC | Human | Brain | N/A |
| CD | Human | Brain | 19-23 wks., M/F pool of 5 |
| CE | Human | Blood | Adult lymphocytes + dend. cells |
| CF | Human | Placenta | 26 yrs., 1 specimen |
| CG | Human | Testes | 10-61 yrs., pool of 11 |
| CH | Human | Kidney | 19-23 wks., M/F pool of 5 |
| CI | Human | Brain | N/A |
| CJ | Human | Brain | 19-23 wks., M/F pool of 5 |
| CK | Human | Testes | 10-61 yrs., pool of 11 |
| CL | Human | Retina | 16-75 yrs., pool of 76 |
| CM | Human | Adult Lung | Adult Lung |
| CN | Human | Brain | 19-23 wks., M/F pool of 5 |
| CO | Human | Brain | N/A |
| CP | Human | Salivary Gland | N/A |
| CQ | Human | Heart | 13-73 yrs., pool of 3 |
| CR | Human | Testes | 10-61 yrs., pool of 11 |
| CS | Human | Brain | 19-23 wks., M/F pool of 5 |
| CT | Human | Brain | N/A |
| CU | Human | Pineal Gland | N/A |
| CV | Human | Mammary | Adult Human Mammary |
| CW | Human | Brain | 19-23 wks., M/F pool of 5 |
| CY | Human | Pineal Gland | N/A |
| CZ | Human | Testes | 10-61 yrs., pool of 11 |
| D | Human | Blood | PeripheralBloodMononuclearCell |
| DA | Human | Placenta | 26 yrs., 1 specimen |
| DB | Human | Prostate | Adult Prostate |
| DC | Human | Pineal Gland | Adult Pineal Gland |
| DD | Human | Testes | 10-61 yrs., pool of 11 |
| DE | Human | Testes | Adult NCCIT Terato CA |
| DF | Human | Brain | N/A |
| DG | Human | Placenta | 26 yrs., 1 specimen |
| DH | Human | Brain | 19-23 wks., M/F pool of 5 |
| DI | Human | Testes | 10-61 yrs., pool of 11 |
| DJ | Human | Placenta | 26 yrs., 1 specimen |
| DK | Human | Fetal Kidney 2 | Fetal Kidney |
| DL | Human | Brain | N/A |
| DM | Human | Brain | N/A |
| DN | Human | Brain | 19-23 wks., M/F pool of 5 |
| DO | Human | Testes | 10-61 yrs., pool of 11 |
| DP | Murine | Embryo | Fetal ES cell embryoid bodies |
| DQ | Human | Placenta | 26 yrs., 1 specimen |
| DR | Human | Salivary Gland | N/A |
| DT | Human | Brain | N/A |
| DU | Human | Brain | 19-23 wks., M/F pool of 5 |
| DV | Human | Pineal Gland | Adult Pineal Gland |
| DW | Human | Brain | N/A |
| DX | Human | Testes | 10-61 yrs., pool of 11 |
| DY | Human | Brain | N/A |
| DZ | Human | Testes | Adult NCCIT Terato CA |
| E | Human | Blood | PeripheralBloodMononuclearCel |
| EA | Human | Brain | 19-23 wks., M/F pool of 5 |
| EB | Human | Melanoma | Adult Melanoma |
| EC | Human | Brain | N/A |
| ED | Human | Placenta | 26 yrs., 1 specimen |
| EE | Human | Testes | 10-61 yrs., pool of 11 |
| EF | Human | Liver | Adult Liver |
| EG | Human | Pancreas | Adult HPC-3 Ductal Adeno CA |
| EH | Human | Blood | PheripheralBloodMononuclearCel |
| EI | Human | Brain | 19-23 wks., M/F pool of 5 |
| EJ | Human | Placenta | 26 yrs., 1 specimen |
| EK | Human | Brain | 19-23 wks., M/F pool of 5 |
| EL | Human | Testes | 10-61 yrs., pool of 11 |
| EM | Human | Fetal Kidney 2 | Fetal Kidney |
| EN | Human | Brain | 19-23 wks., M/F pool of 5 |
| EO | Human | Adrenal Gland | Adult Adrenal Gland |
| EP | Human | Placenta | 26 yrs., 1 specimen |
| EQ | Human | Testes | 10-61 yrs., pool of 11 |
| ER | Human | Brain | 19-23 wks., M/F pool of 5 |
| ES | Human | Placenta | 26 yrs., 1 specimen |
| ET | Human | Testes | 10-61 yrs., pool of 11 |
| EU | Human | Kidney | Adult Kidney |
| EV | Human | Stomach | Adult Stomach |
| EW | Human | Placenta | 26 yrs., 1 specimen |
| EX | Human | Testes | 10-61 yrs., pool of 11 |
| EY | Human | Brain | 19-23 wks., M/F pool of 5 |
| EZ | Human | Fetal Kidney 2 | Fetal Kidney |
| FA | Human | Brain | 19-23 wks., M/F pool of 5 |
| FB | Human | Placenta | 26 yrs., 1 specimen |
| FC | Human | Testes | 10-61 yrs., pool of 11 |
| FD | Human | Salivary Gland | N/A |
| FE | Human | Brain | N/A |
| FF | Human | Testes | Adult NCCIT Terato CA |
| FG | Human | Brain | N/A |
| FH | Human | Brain | 19-23 wks., M/F pool of 5 |
| FI | Human | Small Intest | Adult Small Intestine |
| FJ | Human | Lung CA | Adult Lung CA |
| FK | Human | Kidney | Adult Kidney |
| FM | Human | Brain | N/A |
| FN | Human | Brain | 19-23 wks., M/F pool of 5 |
| FO | Human | Brain | N/A |
| FP | Human | Placenta | 26 yrs., 1 specimen |
| FQ | Human | Testes | 10-61 yrs., pool of 11 |
| FR | Human | Placenta | 26 yrs., 1 specimen |
| FS | Human | Testes | 10-61 yrs., pool of 11 |
| FT | Chicken | Fetal Lung | Fetal Lung |
| FU | Chicken | Limb Bud | Fetal St. 23 Limb Bud |
| FV | Human | Testes | Audit NCCIT Terato CA |
| FW | Human | Testes | Audit NCCIT Terato CA |
| FX | Human | Brain | 19-23 wks., M/F pool of 5 |
| FY | Human | Placenta | 26 yrs., 1 specimen |
| FZ | Human | Placenta | 26 yrs., 1 specimen |
| G | Human | Blood | PeripheralBloodMononuclearCel |
| GA | Human | Testes | 10-61 yrs., pool of 11 |
| GB | Human | Placenta | 26 yrs., 1 specimen |
| GC | Human | Testes | 10-61 yrs., pool of 11 |
| GD | Human | Placenta | 26 yrs., 1 specimen |
| GE | Human | Brain | N/A |
| GF | Human | Brain | 19-23 wks., M/F pool of 5 |
| GG | Human | Fetal Kidney 2 | Fetal Kidney |
| GH | Human | Placenta | 26 yrs., 1 specimen |
| GI | Human | Retinoblstoma | Adult Retinoblastoma Y79 |
| GJ | Murine | Spleen | Adult Spleen |
| GK | Human | Fetal Kidney 2 | Fetal Kidney |
| GL | Murine | Lymph Node | Adult Lymph Node |
| GM | Human | Uterus | N/A |
| GN | Human | Blood | PeripheralBloodMononuclearCel |
| GO | Human | Adrenal Gland | Adult Adrenal Gland |
| GP | Human | Ovary | PA-1 Teratocarcinoma |
| GQ | Human | Pineal Gland | N/A |
| GR | Human | Pancreas | Adult HPC-3 Ductal AdenoCA |
| GS | Human | Retina | 16-75 yrs., pool of 76 |
| GT | Human | Brain | N/A |
| GU | Human | Fetal Kidney 2 | Fetal Kidney |
| GV | Rat | Retina | Newborn Retina |
| GW | Chicken | Limb Bud | Fetal St. 26 Limb Bud |
| GX | Human | Brain | N/A |
| GY | Human | Testes | 10-61 yrs., pool of 11 |
| GZ | Human | Brain | 19-23 wks., M/F pool of 5 |
| H | Human | Blood | PeripheralBloodMononuclearCel |
| HA | Human | Testes | Adult NCCIT Terato CA |
| HB | Human | Fetal Kidney 2 | Fetal Kidney |
| HC | Human | Brain | 19-23 wks., M/F pool of 5 |
| HD | Human | Brain | N/A |
| HE | Human | Testes | 10-61 yrs., pool of 11 |
| HF | Human | Brain | 19-23 wks., M/F pool of 5 |
| HG | Human | Fetal Kidney 2 | Fetal Kidney |
| HH | Human | Brain | N/A |
| HI | Human | Testes | 10-61 yrs., pool of 11 |
| HJ | Human | Brain | N/A |
| HK | Human | Brain | 19-23 wks., M/F pool of 5 |
| HL | Human | Fetal Kidney 2 | Fetal Kidney |
| HM | Human | Testes | Adult NCCIT Terato CA |
| HN | Human | Fetal Kidney 2 | Fetal Kidney |
| HO | Human | Brain | N/A |
| HP | Human | Brain | 19-23 wks., M/F pool of 5 |
| HQ | Human | Testes | 10-61 yrs., pool of 11 |
| HR | Human | Brain | N/A |
| HS | Human | Brain | N/A |
| HT | Human | Brain | 19-23 wks., M/F pool of 5 |
| HU | Human | Fetal Kidney 2 | Fetal Kidney |
| HV | Human | Testes | 10-61 yrs., pool of 11 |

The application's sequence listing, which the Patent Office published only in electronic form, follows.

SEQUENCE LISTING (1519 sequences)

SEQ ID NO: 1 - DNA (cDNA), 400 bp; double-stranded, linear
ggagatgttgaggtggctgctgaccttgggtctcatctccttgattttctttatcttcttcattgccgtcctctctaggctgtctttggcgaggagggcccctgcggaatcgtggtctatatccccgatacatattctgcctcactggtctaccttgttctcctgcaccctggttgtcagcaccctccatcacttctccctgcacaggagggttggaatactgtggtcgacgcccatagggtctccgcatgtagtaaggtgggaaccttcgcctgcggtagggccggcgttgttgggcctggccttcgggagcactctccgatccctcgttcttttccccactctcactattctggtaattttgctggtaattgcgtggaggagaacaggtagactcgag

SEQ ID NO: 2 - DNA (cDNA), 165 bp; double-stranded, linear
gaattagttgccagcactttaaaaattggtatagttcacataaatattctgaattcaggcttttggaaaagttgtggacccaagaatactaggcccgcattttcttacgtcaacattctttccaggatgatgaatggactgttctctttggccccctatctcgag

SEQ ID NO: 3 - DNA (cDNA), 299 bp; double-stranded, linear
gaattctagaccttcctctcctactcccttccttaggctcctgaactcgtttgctcctaaatcttgttaattctttttctctggattttggtttcttttggctttcccttgccttcccctttctctgtctccaacactctttccccatgtctttctggctgtctctatgttcctcttctcttatcctcaactttctgtccattcgggcctcctccccacctcccacgccccagcccctccctccttggtctccttttcgatatgccaaaccaattttgggtcgagtgcattccctcgag

SEQ ID NO: 4 - DNA (cDNA), 241 bp; double-stranded, linear
gcgattgaattctagacctgcctggattgccttctgttgtggtagacaaatcaccattaaatgactaagtttcactgttttatgtgttaatgatccttaataacaaaaagttttaaagtcttaatttcgtaagattatgtaaaggttaagaaagaaattttaagtgaaaatgataaaaccaagcaaatgtttattagttcaattgtttttctttttatcttgcagcaacgcacatctcgag

SEQ ID NO: 5 - DNA (cDNA), 368 bp; double-stranded, linear
gaattcggccttcatggcctaggaaatgactttattgtggttgaattagttaaagggtacttacattacgtgtttgatttgggaaatggtgctaacctcatcaaaggaagctcaaataaacctctcaatgacaatcagtggcacaacgtgatgatatcaagggacaccagcaacctccacactgtaaagattgacacaaaaatcacaacgcaaatcaccgccggagccaggaacttagacctcaagagtgacttatatataggaggagtagctaaagaaacatacaaatccttaccaaaacttgtacatgccaaagaaggctttcaaggctgcctggcatcagttgatttaaatggacggctctcgag

SEQ ID NO: 6 - DNA (cDNA), 430 bp; double-stranded, linear
gaattcggccttcatggcctataaaatttaaaaatgctaaggatctggccccacaggccccaaagctttcacagagctcctcttagacatgaagatgcccattggcctcctaggtcccaggaggtgtgggcaggactgcccttcctccgttctcattgcggggctcctgaagggggtatctgaaagtatgtaaatctgatgggaggtctgatcctccttttgctagcccctgaactctgtggtggagtctggctgatggccagggccatgtcctagaggggactcccctgcaggaggcgggctctaaagggagtggtgtccctttaggccagggttcacagtcggggtggtctggagactgcaggactcagggcctgggggtggcatcagtctggccaggccctgcgtcacttgcacccactgtctcgag

SEQ ID NO: 7 - DNA (cDNA), 391 bp; double-stranded, linear
gggtggctcatgcctgtaatcccggcacttgggtaggccagggcagcaggatcgcttgagcccgggagttcgagacagcctgggcaacatggtgagaccctgtctccataaaattttttaaaaaattgccaggtgtggtcgtgtgtgcctgtgaggctgaggtgggaggctcgcttgagcccaggggtcaaggctgcagtgagccatgactgcacgccactgcactccagcgtgggtgacagagtgagatactgtataaaaaaaaaaagctaaaacaaaacaagaagtattatcttaagcatgttatttagaaatatggagataaataaaaataactgaaagtaggtcgttgcttctgaggagagaaattgggagttggcaaggtctcgag

SEQ ID NO: 8 - DNA (cDNA), 351 bp; double-stranded, linear
gcttttggagctgctaaaatgccggattacctcggtgccgatcagcggaagaccaaagaggatgagaaggacgacaagcccatccgagctctggatgagggggatattgccttgttgaaaacttatggtcagagcacttactctaggcagatcaagcaagttgaagatgacattcagcaacttctcaagaaaattaatgagctcactggtattaaagaatctgacactggcctggccccaccagcactctgggatttggctgcagataagcagacactccagagtgaacagcctttacaggttgccaggtgtacaaagataatcaatgctgattcggaggacccactcgag

SEQ ID NO: 9 - DNA (cDNA), 354 bp; double-stranded, linear
gtgatgtgtcaccccaagtgctccacgtgcttgccagccacctgcggcttgcctgctgaatatgccacacacttcaccgaggccttctgccgtgacaaaatgaactccccaggtctccagaccaaggagcccagcagcagcttgcacctggaagggtggatgaaggtgcccaggaataacaaacgaggacagcaaggctgggacaggaagtacattgtcctggagggatcaaaagtcctcatttatgacaatgaagccagagaagctggacagaggccggtggaagaatttgagctgtgccttcccgacggggatgtatctattcatggtgccgttggtgcttccaaactcgag

SEQ ID NO: 10 - DNA (cDNA), 432 bp; double-stranded, linear
gaattcggccttcatggnctaggaggaggaagaggagtacgaggatgacgagggaggagggggaagacgaggaggaggaggaggctgcggcagaggctgccgcgggggccaaacatgacgatgcccacgccgagatgcctgatgacgccaagaagtaaggggggcagagatggatgaagagaaagcccacgaagaaaaaagcctggttttgtttttcccagaatatcgatggacttaaaaaggctcaggtttttgaccaaaatacaatgtgaatttattctgacattcctaaaatagattaaattaaagcaattagatcctggccagctcgattcaaatttgactttcattttgaacataataaatatatcaaaaggtgttaaagaaaactgaattaaacccaaaattatgttttcatggtctctcctcgag

SEQ ID NO: 11 - DNA (cDNA), 687 bp; double-stranded, linear
ctattttacatgcccaccagcattgtatggggcttctcacttgtccacatgcttgcctgtgtcatatttgacttaaagcttattttgacgggaaaccaatttgtcctttttttggaaagggatggcaccacagatgtgacgcggacaatgcattttgggacccctacagcctacgagaaggaatgcttcacatatgtcctcaagggccacatagctgtgagtgcagccgttttcccgactggaaccaaaggtcaccttcttgactcctttgcccgttcagctttatgggattcaggcctagattacttgcacgggactggacatggtgttgggtcttttttgaatgtccatgaaggtccttgcggcatcagttacaaaacattctctgatgagcccttggaggcaggcatgattgtcactgatgagcccgggtactatgaagatggggcttttggaattcgcattgagaatgttgtccttgtggttcctgtgaagaccaagtataattttaataaccggggaagcctgacctttgaacctctaacattggttccaattcagaccaaaatgatagatgtggattctcttacagacaaagagtgcgactggctcaacaattaccacctgacctgcagggatgtgattgggaaggaattgcagaaacagggccgccaggaagctctcgag

SEQ ID NO: 12 - DNA (cDNA), 420 bp; double-stranded, linear
gaattcggccttcatggcctagtcggtgggtgcctgtagtcccagctacttgggaggctgagggaggagaactgcttgaacccgggaggcagaggttgcagtgagccgagattgtgccactgtactccagcctgggccacaaagcaagaatctgtctcaaaaaaaaaaaaaagaaaagaaaagaataaatttcttttccccttgaagaagttgatttaggcacagactctggactctggatttcccacaatgtcttatctagtcaactcaagtatctggactacaattttcttgaaagcaaagcccatatattaataatctttacttgtatataaatattcaataaatcattaagtaaatgtgtagaagaattttatgctcaataagatccacccgatcatgcatttgaaaattctcgag

SEQ ID NO: 13 - DNA (cDNA), 379 bp; double-stranded, linear
gaattcggccttcatggcctagcacatactctgcttttctgtcaacatcccattttggggaaaggaaaagtcatatttattcctgcaccccagttttttaacttgttctcccagttgtccccctcttctctgggtgtaagaagggaaattggaaaaaaaattatatatatattctccttttaatggtggggggctactggagaggagagacagcaagtccaccctaacttgttacacagcacataccacaggttctggaattctcatcttcgaacctagagaaataggtgctataaacagggaattaagcaaaatgctggatgctatagatcttttaattgtcttaattttttttctattattaaacaacaggctcgag

SEQ ID NO: 14 - DNA (cDNA), 528 bp; double-stranded, linear
gttcatggcctacggaaagtcagcatggataacagactgatggaactctttcctgccaataagcaaagtgttgaacacttcacaaaatattttactgaggcaggcttgaaagagctttcagaatatgttcggaatcagcaaaccatcggagctcgtaaggagctccagaaagaacttcaagaacagatgtcccgtggtgatccatttaaggatataattttatatgtctaggaggagatgaaaaaaaacaacatcccagagccagttgtcatcggaatagtctggtcaagtgtaatgagcactgtggaatggaacaaaaaagaggagcttgtagcagagcaagccatcaagcacttgaagcaatacagccctctacttgctgcctttactactcaaggtcagtctgagctgactctgttactgaagattcaggagtattgctatgacaacattcatttcatgaaagccttccagaaaatagtggtgcttttttataaagctgaagtcctgagcgaggatgccctcgag

SEQ ID NO: 15 - DNA (cDNA), 466 bp; double-stranded, linear
gaattcggccttcatggcctagcccaggccacgctacactctgcccacactggtgagcaggaggtcttcccacgccctgtcattaggctgcatttactcttgctaaataaaagtgggagtggggcgtgcgcgttatccatgtattgcctttcagctctagatccccctcccctgcctgctctgcagtcgtgggtggggcccgtgcgccgtttctccttggtagcgtgcacggtgttgaactgggacactggggagaaaggggctttcatgtcgtttccttcctgctcctgctgcacagctgccaggagtgctctgcctggagtctgcagacctcagagaggtcccagcactggctgtggcctttcaggtgtaggcaggtgggctctgcttcccgattccctgtgagcgcccaccctctcgaaagaattttctgcttgccctgtgactgtgcagactctggctcgag

SEQ ID NO: 16 - DNA (cDNA), 288 bp; double-stranded, linear
gaattcggccttcatggcctagcgtgatcctggaacgtgctctagttcgagagagtgagggctttgaggagcatgtaccatctgataactcttgaagatacagagagaaatccatcttttcccaggtctccttcactgaaaacaaaaatctacttacatacactgtcaccttagcatcagagtcggattaatgaactgcggaacaagaggttgtgagaatctaagatggaacctttctttctttctttctttttttttaaattttgtattttccatccaacactcgag

SEQ ID NO: 17 - DNA (cDNA), 484 bp; double-stranded, linear
gaattcggccttcatggcctagggctctgcttataaacttcaaagttacactgaaggatacggtaaaaacaccagtttagtaaccatttttatgatttggaataccatgatgggaacatctatactaagcattccttggggcataaaacaggctggatttactactggaatgtgtgtcatcatactgatgggccttttaacactttattgctgctacagagtagtgaaatcacggactatgatgttttcattggataccactacctgggaatatccagatgtctgcagacattatttcggctcctttgggcagtggtcgagtctcctcttctccttggtgtctctcattggagcaatgatagtttattgggtgcttatgtcaaattttctttttaatactggaaagtttatttttaattttattcatcacattaatgacacagacactatactgagtaccaataatagcaaccctggtctcgag

SEQ ID NO: 18 - DNA (cDNA), 519 bp; double-stranded, linear
gaattggccttcatggcctaggagatatacctaatgctagatgatgagttagtgggtgcagcgcaccagcgtggcacatgtatacatatgtaactaacctgcacaatgtgcacatgtaccctaaaacttaaagtatatataaaaaaaaaagacntcgctagtgagcacgctgtatacgacatcgctaatgaggacaccatacaaggcatcgctaacgatgacgctgtacacaacatcactaatgatgacaccgtataagacatcgctaattatgacgctgtatacgacatcgctaatgacaccgtacgaggcacgctaacaaggatgctgtacacaacatcgctaatgaggacagtgtacaagccatcgctaatgaggacactgtatatgacattgctaacgaggacactgtacaaggcattgctaacgaggacgctgtacacaacatcgctaatgacaccatataagacatcaccaatgaggatgctgtatatgacatcgctaataacaccgctcgag

SEQ ID NO: 19 - DNA (cDNA), 342 bp; double-stranded, linear
gcagctctcatcctcgtctccccaacaccataacgtcctcatcccgcctccaacccacaccaggccgaagccctcagagagtgttttcatcaggaaccactctcgaacctgaaggttgactttagcgtttagcaacccagggcggtgtgtgtgtttcccgttttgttttctgagtggtagcagtgatcaccgtaattccatgtagccatgtgctagcagaacccctgtgtcctcaccgtggcccgtgtgaccccagccgacgagtgcccggcggagtccccgctgccttcccatggtccagtgagctgccagggcatcacatgactctcagctgggctcgag

SEQ ID NO: 20 - DNA (cDNA), 580 bp; double-stranded, linear
gaattcggccttcatggcctagagcagctctgaggtagaaattacaacgatgaaaagagcacaacgtacaaaaccaagaaagagtctgttgtgtgaagggtcattcgatgaagaagcttctgcacagtcctttcaggaagtgttaagtcaatggagaaccggaaatcatgatgacaacaagaaacagaatttacatgcagcagtaaaagactcattggaagaatgcgaagtacagactaatctgaaaatttggagagaaccacttaatattgaacttaaagaagacattctatcctatatggaaaaattatggcttaaaaaacacaggagaactccacaagagcaactttttaaaatgctaccagatacgttcccacatccacatgaaaccactggtgatgcacagtgttctcaaaatgaaaacgatgaagatagtgatggtgaggagaccaaagtacaacacacagctcttttattgccagtagaaacattaaacatagagagacctgaaccatctctaaagatagtcgaactggatgatacttatgaagaggaatttgaagaagcagaacatctcgag

SEQ ID NO: 21 - DNA (cDNA), 301 bp; double-stranded, linear
gaattcggccttcatggcctagaaagatctaattatcatggacctgcgacagtttcttatgtgcctgtccctgtgcacagcctttgccttgagcaaacccacagaaaagaaggaccgtgtacatcatgagcctcagctcagtgacaaggttcacaatgatgctcagagttttgattatgaccatgatgccttcttgggtgctgaagaagcaaagacctttgatcagttgacaccagaagagagcaaggaaaggtttggaaagattgtaagtaaaatagatggcgacaaggatcggctcgag

SEQ ID NO: 22 - DNA (cDNA), 332 bp; double-stranded, linear
gaattcggccttcatggcctaaaaaaaggatggtgtgttgagaccagaagcagcagcagtcctcgacatcaactacaactttccttcgcacagtgcataccctctgatatactgaacccaacgcctatcctccagccccctaagaactagagagggagcctcacaacattccaatttaatccttcagaaaattcattactcttcaaagttgtctgtggttttgtgacaacgatatgactaggtgcaaaatggcttgcaactaattaacaaacatagaagcatccaacaaacatatacgtgcacaatctgaggatttagggatgaagctcgag

SEQ ID NO: 23 - DNA (cDNA), 239 bp; double-stranded, linear
gaattcggccttcatggcctaccagcctgggcgacagagcaagactcagtctcaaaacaaaacaaaacaaaacaaaaagagaaggctattattaacattcgagataatgtgccagactgcttccatgtattttcattattctgtcccaaatctggtgaagtgggtatctgcacagctttctctagattgaacaactagtaagggggctggccctggagaaagttacctcctgcctcgag

SEQ ID NO: 24 - DNA (cDNA), 238 bp; double-stranded, linear
gaattcggccttcatggcctacttttatattgttatttttgtaaagcatcttttcttcaattcttgttggcattctgggccaaaatatttcaggttggttcggtgtggagttaagaaaagcaggcgttttagtggagaaatggggaacagcatcaagaaaggcttttttccttttttcttttttttttggagacagagtcttgccctgtcacccaggctggagtgcaatggtctcgag

SEQ ID NO: 25 - DNA (cDNA), 231 bp; double-stranded, linear
gaattcggccttcatggcctagatggatttcttaattgaagtacttttataatcacagtgactgaacaaaatattttcaaagacatttgtcattccttaaagccaagattttaaagactaatgtccttcctgagggttactttactatactgtgtatggtgtatagccacagaaagtcagtctgataaattttcaatgtgtaagtgtgatgcattcaacccagatctcgag

SEQ ID NO: 26 - DNA (cDNA), 307 bp; double-stranded, linear
gaattcggccttcatggcctacacagagtatatttatagctatctcagggtccttgtccaattgtctgtgtcatttcttcatctgcttctactgattttttctgcttctgtttactcttcattttggacctattttcccttatttggtgctttgcatacaatttgttgggactggatctttgctagtcctttaaatgtttttaagctttgttttgggatgcagttaggtgactcagaaacaatcagaaacaatttgatccttttatgtctcttaagctttgttataggcaggaccagagctctcgag

SEQ ID NO: 27 - DNA (cDNA), 253 bp; double-stranded, linear
gaattcggccttcatggcctacaataatagcctcccacctggtcttccttcttcagtctcttcagtctttcccaaagctcttgaatcctacatgaacccatgcctcggtcaaaatattacaggctgcagccaatcttcaagtggcatacaggccaaacatccatttataatatggttggaattcctaacacattttatcatagatctaatgccatacaataggtggaggttagatcctcacgcaactctcgag

SEQ ID NO: 28 - DNA (cDNA), 254 bp; double-stranded, linear
gaattcggccttcatggcctacagagaacttgtgttccggtttattgaagttcagacacttctcctcgctccattctgtccacatttgtgtgagcacatctggacactcctgggaaagcctgactcaattatgaatgcttcatggcctgtggcaggtcctgttaatgaagttttaatacactcctcacagtatcttatggaagtaacacatgaccttagactacgactcaagaactatatgatgccagctcgag

SEQ ID NO: 29 - DNA (cDNA), 211 bp; double-stranded, linear
gaattcggccttcatggcctacgagaaggagtggaagagtaagcagactaggaaaatacagtacaaccatcaggcagcattacagacccacttaaggtttgtggccatgtgtggttgtgtggttttttttctggccatgctcagttacataggggcaagtgcaaaaaaaaccccagagtttgttttaactagagctctggttttgccaaac

SEQ ID NO: 30 - DNA (cDNA), 521 bp; double-stranded, linear
gaattcggccttcatggcctaggatcaggttcgtcctttagtgttgtgtatggttatcatttgttttgaggttagtttgattagtcattgttgggtggtgattagtcggttgttgatgagatatttggaggtggggatcaatatagggggaaatagaatgatcagtactgcggcgggtaggcctaggattgtgggggcaatgaatgaagcgaacagattttcgttcattttggttctcagggtttgttataattttttatttttatgggctttggtgagggaagtaggtggtggagcacaggcactgcaggtcaatggaggtggagtacagggactacaggtcaatggaggtggagcacagggactaaaggtcaatggaggtggggcacagggactacacgtcagtggaggtggagtcacagggactacaggtcactggaggtggagcacagagactacaggtcagtggaggtggggcacagagactacaggtcagtggaggtggagcacagagaccacag

SEQ ID NO: 31 - DNA (cDNA), 238 bp; double-stranded, linear
gaattcggccttcatggcctaaaatttcctctaagtactgatttagctgcattgtataagtatatgcttccattttcattcatttccaaatattttctaatttcctttgcaatttttttttcaggaattcgggccttgctgtgttgcccaggctggagagcagtgccactatcacagctcactataaactcaaactcctgggctcaagcaaccctcccacctcccaactcccctcgac

SEQ ID NO: 32 - DNA (cDNA), 257 bp; double-stranded, linear
ggtttcttaaaaaaaaaaaaaaaaggaatttgatccagagcaatttttctcaattaaaatttgtgattacatttctgagtttccatggcagagttgtgagtggggctgtgatataatttaacttctcctaaattgctgacaccgataaccctataaattaacagatggcggagggaaatctcctggcttcttcctggctagttttttttaatggtctgatttttgtaataggggttttgagtcccagccgactcgag

SEQ ID NO: 33 - DNA (cDNA), 251 bp; double-stranded, linear
gaattcggccttcatggcctaaagacttacgttatattttcatatactccttcccactcttagtgtgttgtcaatatacattttgttttacatgtaaaaacaccacagtatattgttcttaattttgcttttaatagtaaactgtcttataacaaattatgaaaatggaaaaaaacatgtctttcttatttgccctcatatttatccatttaggcactcttcctttttccctttcattccaggttctcgag

SEQ ID NO: 34 - DNA (cDNA), 245 bp; double-stranded, linear
gaattcggccttcatggcctactaacatttatgaaaattatttgtaaataaaataagaggcattgagattaaaattggagataaagttgctgatgtgttgttttcctgaagtattttttttcttaattctgatctttgtttcccaatacaatcacactcacacccttgcagttcagtttcctgacgactctctagtgtgccagatctgtgtttctatgtcagtgatctgttccccatctctcgag

SEQ ID NO: 35 - DNA (cDNA), 383 bp; double-stranded, linear
gaattcgcttcatggcctaccgagaaatgggtgtgattgctgccatgagagatggttttggtttcatcaagtgtgtggatcgtgatgttcgtatgttcttccacttcagtgaaattctggatgggaaccagctccatattgcagatgaagtagagtttactgtggttcctgatatgctctctgctcaaagaaatcatgctattaggattaaaaaacttcccaagggcacggtttcatttcattcccattcagatcaccgttttctgggcacggtagaaaaagaagccactttttccaatcctaaaaccactagcccaaataaaggcaaagagaaggaggctgaggatggcattattgcttatgatgactgtgggggtctcgag

SEQ ID NO: 36 - DNA (cDNA), 133 bp; double-stranded, linear
gaattcggccttcatggcctactgccgctcctggtgctgcttgtgtgctcgtttggtgcggacctggtacctcttttgtgaagcggcagctgaggagactccggcgctcgccatggccgacgaaaagctcgag

SEQ ID NO: 37 - DNA (cDNA), 276 bp; double-stranded, linear
gaattcggccttcatggcctaaggtagtctaggctcatcttcatgagggaactgaggtcttggggggtgggggttacccaaataggttcacagaagaaccagaaataaaacctgcctttctagactgtaagtcttgtgattgtcatctaaatggttgtctctatacagcaactcatctctagaactgaaaataagtttaaatccctcctccatccccaataattcaagctgcatttcagagaaaaccaggactttggaatcagacagcaactcgag

SEQ ID NO: 38 - DNA (cDNA), 336 bp; double-stranded, linear
gaatttgtgctcttagagtaggagttggaactataggacttgaaggcaagagcaggtatcttatcaaggatctactcactcagtttccctaaagctctctctccagatcggattcaaccgcacatcatgacagatgttccggctacatttacccaggctgagtgtaatggggataaaccacctgaaaacggtcaacaaacaatcactaaaatcagtgaggaattgactgatgtggacagccccctgccacactacagggtagaacccagtctggaaggtgcactcaccaaaggaagtcaggaggaaagaagaaaattacaagggaacagactcgag

SEQ ID NO: 39 - DNA (cDNA), 385 bp; double-stranded, linear
gaattcggccttcatggcctagtcggagaaggacatccaggatctgaagtttggggtcgagcaggatgttgatatggtgtttgcgtcattcatccgcaaggcatctgatgtccatgaagttaggaaggtcctgggagagaagggaaagaacatcaagattatcagcaaaatcgagaatcatgagggggttcggaggtttgatgaaatcctggaggccagtgatgggatcatggtggctcgtggtgatctaggcattgagattcctgcagagaaggtcttccttgctcagaagatgatgattggacggtgcaaccgagctgggaagcctgtcatctgtgctactcagatgctggagagcatgatcaagaagccccgccccactcga

SEQ ID NO: 40 - DNA (cDNA), 245 bp; double-stranded, linear
gaattcggccttgctaaaaaaaaaaaaaaagaggcaagtaatgtaatatcccccacctttggttttcttatctataaatactgattaaaaaaaaaagtacactgtctgccttataagctaaaatgagtgaatacaggcaaaatgccttacattttactttacatttactaagcacccagaaaatgttaactatgatgacaattatgatgatgatgatattgatattttcaaggagggcgctcgag

SEQ ID NO: 41 - DNA (cDNA), 247 bp; double-stranded, linear
gaattcggccttcatggcctaaataaagatgatttttgtgcttagcagtttaaggtatatggctgcatatgcaaaactctttcccaattcagtcgctacttttacttctgccctttctatccatcgtcttcattttgtgtgtacagtgctgtgtgtaagcttatcagtgtgtttttttatttgtatcagtcatgaaagtcctgttaggtatccagagttctatttatctagctgtacagatctcgag

SEQ ID NO: 42 - DNA (cDNA), 106 bp; double-stranded, linear
ggatatggtaactgagaaccattttctagttgagataactcatgtacagggggggtcacatgactcaacaacacacagagcacagaagagaaccaacaatctcgag

SEQ ID NO: 43 - DNA (cDNA), 237 bp; double-stranded, linear
gcgtatttccaagtgtatgtatttctaaagatagattttttaaaaacaaaaaatcttaatttagatgataagcgatttttacctttttttttttttcaaagcaacttgatcctgtaagttttggcatcttaagtggaaatgttcatgcagttttgctggatcttcgctatggcagtaaaatgcaatacagcactgtggttaagagtgcagaacggagtcagtcagcctgaactcgag

SEQ ID NO: 44 - DNA (cDNA), 476 bp; double-stranded, linear
gaattcggccttcatggcctataggccatgaaggccggccttcatggcctagggagtnggtgtgtctgtgcatttatttggatcatggaaggttgtagatgtgtatttctaactgtagataatggaggacacatatttggggagttttgagaggatgtgtatgtgtgtgtgtgtgcagtgtggtatttctctatgttttggtgggtggggtatgtatccatcaaaatatctcagattatctgatgtaagaaaataattctgcatctcagtgacttccaacaaggtaggtttctcatgtatgttatgtgtcctccattggttggctttgatcagttactggtcctgtgccttggatccagatggatgaagcggcctcatttgggacaggactagaaggacttcttctgctcagagtcatacatggcatttctgatcacatttcatttgccataacaagtcatgtggccatactcgag

SEQ ID NO: 45 - DNA (cDNA), 358 bp; double-stranded, linear
gaattcggccttcatggcctaggcaaactctgctggacttaacttcatcaatgtagtgggctctgtttgtggggcccaggctttgatgagtggttcaaaccccatgctgggctgtaacactggtgccataactcctgcaggaataaacctgagcggccttctaccctcaggaggtctgctaccaaatgcactgcccagtgcaatgcaggcagcttctcaagcaggtgttccatttggtttaaaaaatacttcaagtctcaggcccttaaatctactccagcttccaggtggttcacttatttttaacactctgcagcagcagcaacagcagctctcccagtttacaccacaactcgag

SEQ ID NO: 46 - DNA (cDNA), 353 bp; double-stranded, linear
gaattcggccttcatggcctaatcattttgactttcagtgctttcaatgaccagtggcctccagggataaagcaactgcttggtttgcagggcgtcctctgcgctgctgagccatcagcctccaatacgccaatgcccatagatgctagttacagccctgcttcctcctacatagggttctgtcatcactgagtctcaccatttccctctccccagtgtctttattatgtgacacacacacacggcactatgtttaaaaaagcgtgctcactggcaacctcttggcgttgtgtgttcattctgtgttttgtattggtggtatcttggggtcgaccgaaagagtcaacctcgag

SEQ ID NO: 47 - DNA (cDNA), 456 bp; double-stranded, linear
gaattcggccttcatggcctagggagctaccagatgctgaagaaagggccctggcagactgggttcaaactcagccattgtcagcttggtaaccttgaccaagtgtcttcccctctgtgagcctcagttttctcaatagtaagaggggataacacacttacctctcatagctgtggacatggaggtgaaagtgccgcatacactgtaaagtgttatatacgtgtaagagaaaaaatcgggccagaggctgggcttgtgttaattgattcaggaaattcaccagaggccccctagatgcaacgtcctttgggtgtctggcagtgggcacaaagatgaacaaaacagtgccccaccctcaccccgtcaaccgtcagtgcagcagtgggctgggtgcttgcgtcccacagtgaggaaggcagaaggggtccctgccctcaaaggaggacgatactcgag

SEQ ID NO: 48 - DNA (cDNA), 509 bp; double-stranded, linear
gaattcggccttcatggcctagctgccccgcagcacttaccggagcgaccatgagggtgacgatttgaagcacacacaggcttcccgccacctcctttaaaccgccgctggcttgccagggacagacggcgcggttggctccccaaaattccgactgatacgcgcctcggcgagcgaaagcaaacgcgggatactctcgcgttcctgattggctgcagttggaattgatcacaccttttcagttgtacttcaatcctgaattaatctttaaacactttcaaatatggagattaatcaccaacttcttattttttgggccagttggattcaattttttatttaacatgatttttctatatcgttactgtcgaatgctagaagaaggctctttccgaggtcggacagcagactttgtatttatgttcctttttggtggattcttaatgaccctttttggtctgtttgtgagcttagttttcttgggccaggcctttacaataatgctcgag

SEQ ID NO: 49 - DNA (cDNA), 467 bp; double-stranded, linear
gaattcggccttcatggcctaaagcaagtgattttcttttttttaaagacagggtctcacttggtcacccaggctggagtacagtgacatcatcacggctcactgcaaccttcgcctcttgggctcaagtgattcccccatcccccaccccccttctcacccccagattggactataggcgtgtaccaccacgcctggcagagaccgggttttgccgttgcccaagctgatctcgaactcctgagctcaagcgatctgcccgtctcagcctcccctaagcaagcatttttaagtttctatgctgtttaattttttttaactgattaatttatttgcattgtgtggtcatggaatatgtttttatgatattggttgtttgagatttggtgagtctttctttgtaacctagttaaaccattccatatctttttaaaaggatgtatattccttatctgttagggctcgag

SEQ ID NO: 50 - DNA (cDNA), 168 bp; double-stranded, linear
gaattcggccttcatggcagagtggaaggggttgtaaatattaggagagagataattcttagtgcatttctctgaggatgaagcatgagatgaatccatggcacgaatggaacagctggggaaagcaggtcagaatggatatggatataaatactgtgagttctcgag

SEQ ID NO: 51 - DNA (cDNA), 228 bp; double-stranded, linear
gaagtaaattattacgatttccttaggtggttaataaattaccattattttctctattttacagatcacgaaatgataagtaacttaccgaaagttacattatttaagttaatcaaatgtttattgattgccagacttttttctaggcttaagcaaatgttggaaaatacttctctgagctttcaaaaatgttatttctacttgtcagtgctgcaggagtctctcgag

SEQ ID NO: 52 - DNA (cDNA), 247 bp; double-stranded, linear
gcagagtcaatagatactttaaattgaagtaaagaattaaaaaaggaagtggatagtttgggtattagtttagctagaaatacaaagaaacttgacttctagggcagtacaaattcaagccttccacaaacaaacagttgagagtatgtttatcttcttaaaatgtgtgggtgccttcccaccacttcacctgctcctcactggtgctttgtcccctccctactaccattcctgtcccggtctcgag

SEQ ID NO: 53 - DNA (cDNA), 235 bp; double-stranded, linear
ggccaaaacaaagcttataaaggttcctgctcccaacgtaattacctccaatcggcatttaaagacatccgcattgcttacagcacatcctagcctcatgcttgcccaaggatggactcgaaatgaactatttccagagcgacttattcaggcattctgtggagcctccgttgccctgtccatcaccggagcttttgtaattgcagctatgccattggcctccggcaacctcgag

SEQ ID NO: 54 - DNA (cDNA), 231 bp; double-stranded, linear
gaattcgccttcgtggcctaaaaagaaaaaatctaaggtagattgtgccttttgtgcctttcctctgctcaagacctttcagtggcttcccacttcactcagtaaaaggcaaaaagtccttttaataacctacaaggcattatgttacccacattgtccctgctcccctacattgtactcaagtctatgatctttttaccattccttgtacaaaggattttcactggctgg

SEQ ID NO: 55 - DNA (cDNA), 330 bp; double-stranded, linear
gaattcggccttcatggcctagaaatattttcctacaagagtactgaatttcaggaaatgggatagagcttctaaccagtgtattccgtcaagtaagataataacagctgacctgccaacagcattacagggagattctttgctcagctaacacatttctgtttttcaaaattgatgcttaattgtagctgttattctaatttgtgacatggaactaactcatgcttcaatccttgatagagcaaaactcagaacaggttatgtaaaaatatagtctggctttagaatttgttaattcacctgctttgccacagaaaatggagactcgag

SEQ ID NO: 56 - DNA (cDNA), 230 bp; double-stranded, linear
gaattctagacctgcctcgagatctgaactataatcttttccattctatctagctcccatcctaagtcctctcctcctaacgtggaactctcctaaaatcttctccttatactagggttcgagacatgaggctgtctttttgggccttttgcgttgtcacagtcccagaccacggaacattctctcttccccaggacaggacattctctcttccccagcgctccctcgag

SEQ ID NO: 57 - DNA (cDNA), 416 bp; double-stranded, linear
gaattcggccttcatggcctaaagggaaagtgggaatatacacaatgcanacactagccacatgcaatcatgggagaacagagcctacttaaaaatcanacccaagctttgcttcagaaataagtggagttgaacccattcgatcatttacgcatgactttgcaaaggttctctggagggggaagaggatcaaccttctctcataccgcacagcaagggaaccaaagtaatataaatcactcttaaaaatgtcatgttactttaagaataagccatactgctggcacctagaatatttttgtgggtccccatctctggcttttcttgttcaaatggcccccaggctaagaggcagctgctcacatccctgcaacaaacatgttctttcctttctgcatagccttccatttctcgag

SEQ ID NO: 58 - DNA (cDNA), 289 bp; double-stranded, linear
gaattcggcttcatggcctactagacctgctcagtcgttcctaatgaataaaaatcaagtgccaaagcttcagccccagataactatgattcctcctagtgcacaaccaccacgcactcaaacaccacctctgggacagacacctcagcttggtctcaaaactaatccaccacttatccaggaaaagcctgccaagaccagcaaaaagccaccaccgtcaaaggaagaactccttaaactaactgaaactgttgtgactgaatatctaaatagtggaaagtcactcgag

SEQ ID NO: 59 - DNA (cDNA), 382 bp; double-stranded, linear
gaattcggccttcatggcctaatttgaggcctgggtggaactgacaggtggagtttgaaggcacatctgctagctcacataggaaacagaatctcccagggaaaagacataggacctctgactctaactgaggttctggattattatgagagattttcagaaatggtctaatggtgttggcttgctccataccatagattttaagagacagtagagcttctgcgatgagattcccccataaaataattatggatctgcactggcaagctggtcttggctccaaagaccaagagttggtttgtggtgctgattctgaacccttgcgatgcaactgtctggtagtaaaatggctttgtatggtaagaaagctttaatcctcgag

SEQ ID NO: 60 - DNA (cDNA), 196 bp; double-stranded, linear
aaaaaaaaaccaaaccctattatttcattgacagattgtcttagagttgatagcatttaataattgagtaagtacagtccttccttgttcccaacgtgccctattttttctttcttctctacttttgcatatgcattttccctctttcttgtttcttggtgaattcctaaaccttttttttcaaaatcacctcgag

SEQ ID NO: 61 - DNA (cDNA), 281 bp; double-stranded, linear
gaattcggccttcatggcctaaccacatttttctaattagtgttctagactggctagataaatcaacaatgaatcaacagtctttaagcacatatacaggtatgataactctgtagttaactcaaatccttgtgctatgtattattttgctgcgtaactcagaattcaggaagctacccacccaatcagtctttagctgttttatttcagtaacaagtttatgcagaaccttccatatctctcataaaaccagagcattcatagaaccagaaactctcgag

SEQ ID NO: 62 - DNA (cDNA), 400 bp; double-stranded, linear
gaattcggccttcatggcctaaaagatttgagcatttcaaaattttaaacataaaagcataaacgtagataaaatgaaggtgtactatgatatcttcagttttatcagaaatgatgtaaaaattacaacctctttaaaaagtagtgttaatcattaagttagaaaatatatagctgggcatggtggcagatgcctgtaatcccagctacatgggaaggtgaggtgggagaatcgcttgaacccaggcagtggaggatgcagtgagccaagatcatgccactgcaccccagcctgggtgacagaacaagactccatntcaaggaaaaaaaaaaagaaaaatatatatatgaacttcagaatctgaggtcatatatagacaggtcttccccccgtcctcgag

SEQ ID NO: 63 - DNA (cDNA), 297 bp; double-stranded, linear
gaaaccatagtggcagatttgtagcaaaaagaatctttgtaaccttccctttagatgtcctgtgttatggcttggtttttctcaaagatcatagattgcagtgtttatctcaactcagtatttcctttgaaaattgaacttttctctatattttcctttcccccatgcaaactttttgattgtttttctgaaatcataattcatttgacttaccagttaatattgatacaggtcttgcatgttatgaagtgcattgtgtacattatcttgtttaattttcacaacactcttctcgag

SEQ ID NO: 64 - DNA (cDNA), 361 bp; double-stranded, linear
ggtcgcagaagagtgtcagaacaatcagttaaagaagctcaaagaaatctgtgagaaagaaaagaaagaattaaagaagaaaatggataaaaagaggcaggagaagataacagaagctaaatccaaagacaaaagtcagatggaagaggagaagacagagatgatccggtcatatatccaggaagtggtgcagtatatcaagaggctagaagaagcgcaaagtaaacggcaagaaaaactcgtagagaaacacaaggaaatacgtcagcagatcctggatgaaaagcccaagggggaaggttcctcctcattcttgtcggaaacttgccatgaggatccctctgtttcccccaaactcgag

SEQ ID NO: 65 - DNA (cDNA), 393 bp; double-stranded, linear
gaattcggccttcatggcctactgggggaagaaggctgctttatgtttatttttcaagactttaaaaatattttttggttgtattgcactaggaaatctctcccacctctcccttttctctttctttccctatacaaaataaaaggcccaccatagagactaggcggccgaaagactaggagggctgaggaaaagaaataggtctctggaggtggaactaaaactgtgcagctgcctcttcctggcggtggatgctgctttgggagggccagggaggctgcagggggacagtgttgggattgtcaaggaaaaaggggtaggaaggaaggtggagggattgatctagtaccagggagaatattccactgaactgtgattctatgcggcctcgag

SEQ ID NO: 66 - DNA (cDNA), 335 bp; double-stranded, linear
gaattcggccttcatggcctaatttgttattgctagaaaatacacagttttgagatttttgggcataattggccttagtgtgtcacttctgcattaaaatataggttaataatcagatgaaagcagccaataacctatggcttctgtactttctggtgaaagttttgttaatgtttttaatttgtatttttctgcttataaatttgtccttaaatcactcccctccttcccgcccccccgactccttctccctccttcccgcccccccaactccttctccctccttcccgcccccgcgactccttctccctccttcccgccccccgatcctcgag

SEQ ID NO: 67 - DNA (cDNA), 235 bp; double-stranded, linear
ggtgacatatttattgcttctgttttccaactacatcacttcaactagaagtaaagctatgattttcctgacttcacataggaggcaaatttagagaaagttgtaaagatttctatgttttgggttttttttttccctttttttttttaagagtataaggtttacacaatcattctcataatgtgacgcaagccagcaaggccaaaaatgctagagaaaataacgggatctcgag

SEQ ID NO: 68 - DNA (cDNA), 257 bp; double-stranded, linear
gaattcggccttcatggcctaccacaatctgtttgcttttcctctttagattccaaaaataacaccccaaaggctaccttttcaaatattctacaacatctgcaaaaatctttagtactctgtccttggagtcagtcaagaaattccaccccagaagtgtaaaaaccaatcaataatatatgacactgattttctctaaattattatttttcttatggttgagtctcctgccaactttatgtttcccaatcggctcg

SEQ ID NO: 69 - DNA (cDNA), 261 bp; double-stranded, linear
gaattcggccttcatggcctagctgggcatggtgatgcacgcctgtaattctagctactcaggtggggggttaaaggtgaggcaaggtcagcggtgaagtgcagctcagagggaggggtcaaacataaaccagaacttataggtctagaggtaaaatgggattcatggggggcagaggtcaaaggtgaagcagaagtcaggggtgaaggaaggtctgcaaagttaaaggtgcggtttccagagtcagaaggggtgctcgag

SEQ ID NO: 70 - DNA (cDNA), 279 bp; double-stranded, linear
gaattcggccttcatggcctagattgaatttttaacacagtcctctcagaaactgactaaaacaggttttaaaattagcaaatattaagaacatacgagtaaaagtcagtttattttagataagtagggatttaaattcaacaaaaataaacacattttaaactcctataatacatttatttaaaataaatatatttttgccaaaagaagtgtaagttcaaagagttaacatacagattatatcctatgagatataataatattagaaactggctcgag

SEQ ID NO: 71 - DNA (cDNA), 255 bp; double-stranded, linear
gaattcggccttcatggcctagttacatttataatcagtgaggaaaatataaactatacaataaatgaaagggtcattggccaattgtttggagggaaaaaatacaccatgttctaaaataaatttctagtgatttattgtgactttcatgcatttggatgattttaaagattttatataaaaatgaaaccatagccttacgagaagaaaatataaagaaaaacttgtatagtcttgggaggggggattctcgag

SEQ ID NO: 72 - DNA (cDNA), 138 bp; double-stranded, linear
gcgattgaattctagacctgcctcgagatcgtcttttctacctggatgagagctctaccacttctttccttttgcacactcatctcattctatgcactcttgggctgtaactgtcatttcttttcctgtacactcgag

SEQ ID NO: 73 - DNA (cDNA), 208 bp; double-stranded, linear
gaattcggccttcatggcctatcacattgcattaaatctgtagattacattgagcattatggacatcttcaaaatatttcaaattttgaacaggagcatgctgaagagtgtgttgtttaatttctatgtatttgtacattttttttctctatcttatactgccgagaccagctcagtcggggagaccctaacccaacggcagctcgag

SEQ ID NO: 74 - DNA (cDNA), 268 bp; double-stranded, linear
gaattcggccttcatggcctacatgaaactgttagtcacttcatttctgtttcttccctgttgcaacagcccatcttcgtgggaagaaccaagctttaggcttggctctgaacagccacaaagtgacttggctgaggtcctgccatttcgctcatgctcagcagggggcagcagaccagggcagttcagagtatggggtcaaacccaggtccctgtccccactccacctgtggatttaccctggattgggcaagccccattactcgag

SEQ ID NO: 75 - DNA (cDNA), 286 bp; double-stranded, linear
gaattcggccttcatggcctacgtgaacaagaccctcccaaaccttcaggtagtcaaccaccagcaaggcccccaccacagacacatcctgaagctgctgccgtccatggaggccactgggggcgagaagtccagcacgcccatcaagggccccaagaggggacatcctagacagaacctacacaagcattttgacatcaatgagcatttgccctggatgattgtgcttttcctgctgctggtgcttgtggtgattgtggtgtgcagtatccgggaaaagctcgag

SEQ ID NO: 76 - DNA (cDNA), 199 bp; double-stranded, linear
gaattctagacctgcctcgaaaatacactgttactatcttaatctcaagagtgtcattacagtgagaatctcatttaaaagcataccagtgaaattaatagcagtgcttatcaaagaacactgaaatctgtgagaatctttctaggagcattcttttcttcttttagttccaagttccaggtaggccatgaaggtcgag

SEQ ID NO: 77 - DNA (cDNA), 233 bp; double-stranded, linear
gattgaattctagacctgcctcgagttccacgtccatggccatcctgagcatgctgcaggacatgaatttcatcaacaactacaaaattgactgcccgaccctggcccggttctgtttgatggtgaagaagggctaccgggatcccccctaccacaactggatgcacgccttttctgtctcccacttctgctacctgctctataagaacctggagctcaccaactacctcgag

SEQ ID NO: 78 - DNA (cDNA), 276 bp; double-stranded, linear
gaattcggccttcatggcctaagaatagagaaaacgttttcagcaggcttcacagagaaaccaaacaatatttagaatatgacagcatatgaagagtctgctactctcccagtgacccatactttctcttccatctctgctggttctctctactaccgattctttcttgctgttctccttctccatcaccgtgacttctattgccttactctaatgtcttgtcttctgtgttacccttctgtgtgttttgcattcagaactccccctccgctcgag

SEQ ID NO: 79 - DNA (cDNA), 273 bp; double-stranded, linear
gaattcggccttcatggcctaaaaaaaaaaaaaaatccctggctgagaactattggattagggcctccngtacctatctttgagggggaaaggatgctaccatcaacttttctgaatgccaggaatgccttttagtatagttatttcacttactattttatagcatattttaattgtatagtaagcattgtgtctgttttatggtaaggaaactaaaattgagagattaggctgctcgtggtggcttataccttgtaatcccaagcactcgag

SEQ ID NO: 80 - DNA (cDNA), 284 bp; double-stranded, linear
gaattcggccttcatggcctagcgaaatgacgaaatctagccctttgaaaataacattgtttttagaagaggacaaatccttaaaagtaacatcagacccaaaggttgagcagaaaattgaagtgatacgtgaaattgagatgagtgtggatgatgatgatatcaatagttcgaaagtaattaatgacctcttcagtgatgtcctagaggaaggtgaactagatatggagaagagccaagaggagatggatcaagcattagcagaaagcagcgaagggctcgag

SEQ ID NO: 81 - DNA (cDNA), 284 bp; double-stranded, linear
gggaactggaggaaaaccatcacaagatggagtgccagcaaaaactgatcaaggagctggagggccagagggaaacccagagagtggctttgacccaccttacgctggacctagaagaaaggagccaggagctgcaggcacaaagcagccagatccatgacctggagagccacagcaccgttctggcaagagagctgcaggagagggaccaggaggtgaagtctcagcgagaacagatcgaggagctgcagaggcagaaagagcatctgactcaggatctcgag

SEQ ID NO: 82 - DNA (cDNA), 311 bp; double-stranded, linear
gaattcggccttcatggcctactgtgttgacttggtggcttgcttgataagaaggttttatgaagcacagcagatatctcagctgctaatcctgtaagccctttacccattctcgcttttctctgctcttgccacatcatgaatagattggtatactattgtgggatacttctagttttagcacatgatataggttatggttaatgttcctttccatcttcctggttactgataatgttccttttctgtagatgggtctattcgatggaagagtttcagctttgttcgtgttatttccctgggacctcgag

SEQ ID NO: 83 - DNA (cDNA), 329 bp; double-stranded, linear
gaattaatcgtaagagaacctcagcattgtgcacgataagagaatgtgtcagtatttcagggttctacattttatctgtaaaatgtgacttttttttttttttatcacaacagaagtaaaatgttgctttgtacctggtgtcttttattaagaatttactccccccatttctcacagagaataacagtcgggagtcattgtcacaatataatagaaatgttagcaaccagattcatgtaaggactaagtggtcctcatgaattgcattaagactctgtactgctcatattacactccatcctctctgtagtttgctgggtattctcgag

SEQ ID NO: 84 - DNA (cDNA), 312 bp; double-stranded, linear
gaattcggccttcatggcctagaaagacatcatttaagtncttttaacatttagtttgtggtcataagttgacctttatgtgctttctgaattggaacttaaaataatctttaattcattattttttctacttctaggccagttttgagtttaatatttataaaaggttagatagttatagataggattattttgcagttttgaaacaacatacaaattgttatagatttcagagtagggctaatcacaggaaagacaaaagtcagaatgcttnaggtaagccccttctcattatataagatcaagctcgag

SEQ ID NO: 85 - DNA (cDNA), 304 bp; double-stranded, linear
gaattcggccttcatggcctaaaaactttcaacttagaaaaactagcaagggattgttcacccttaccccagtggttggtgctagagaaaaaatggaggatgtctgttccacgcagaccctggtggtttaaaacacacatatagatggctctgggaccatcaaaatagcagcagcaaagagccactccaccagcctcccctccactcccccaggccccacacagcagaaggctccagccactttttggaagcctgtagcctggctccatcttgccctgtgccacaaatgcccatggccctcgag

SEQ ID NO: 86 - DNA (cDNA), 291 bp; double-stranded, linear
gaattttgaacactaaagctttggatacacaaatttataacatcttatttataaatcagtggtgtacagaaagcagagatcccataatcaagcatggcaaacatgttgaagaatatgcttacaatgatttctgctatagatttcataatggggattcagagaagtagagttatggtgctggttcactgcattgattggatcaggcgctggaaactctccctgatagattttattctcacctgttgggcaatttccagaatattctgctgtaattttacatgtgggctcgag

SEQ ID NO: 87 - DNA (cDNA), 423 bp; double-stranded, linear
gaattcggccttcatggcctagctagaaaaaaaaaaaaaaaagcccttttcagtttgtgcactgtgtatggtccgtgtagattgatgcagattttctgaaatgaaatgtttgtttagacgagatcataccggtaaagcaggaatgacaaagcttgcttttctggtatgttctaggtgtattgtgacttttactgttatattaattgccaatataagtaaatatagattatatatgtatagtgtttcacaaagcttagacctttaccttccagccaccccacagtgcttgatatttcagagtcagtcattggttatacatgtgtagttccaaagcacataagctagaagaagaaatatttctaggagcactaccatctgttttcaacatgaaatgccacacacatagaactccaacatctcgag

SEQ ID NO: 88 - DNA (cDNA), 172 bp; double-stranded, linear
gcgattgaattctagacctgcctcgagcttggggggattacagttcaacaagagattcaggcagagacaaatattccaaactatatcaggaattaagtaggctttgctgtccttttgcagctttgagtcaacccatatgagagtgaattctccgatcctgtacatactcgag

SEQ ID NO: 89 - DNA (cDNA), 260 bp; double-stranded, linear
gaattcggccttcatggcctacccgtgttgtccagtataccttataacacttagccacttctccccaccctccagaaggggtccacgttgaattctgaatcatcttgaaaataagattccaaccacaaaaaaaatttagccatttctttactaaaaaaaaccaaaaaacaaatctgttttataatcacagatttttagacaaatttcttgtatcaggaagaaatacaaattttgtcatgtttctcaagcagtgtctcgag

SEQ ID NO: 90 - DNA (cDNA), 250 bp; double-stranded, linear
gaattcggccttcatggcctaaactaagataaaaataaacagataggagagctgaattccatttcaagtcctcatgtatatgcttacaaagttccaaattaagcttgggactggttcttacatggcaggtaatccaaaccttttctatttactgaagattttcagctctcttacagaaatacacaggctaccattaaaattgtagggataaattttaaattgaatttgaaaataagagcaagtactcgag

SEQ ID NO: 91 - DNA (cDNA), 260 bp; double-stranded, linear
gaattgaaacacagagttgttctgctgatagttttggggatacgtccatctttttaagggattgctttcatctaattctggcaggacctcaccaaaagatccagcctcatacctacatcagacaaaatatcgccgttgttccttctgtactaaagtattgtgttttgctttggaaacacccactcactttgcaatagccgtgcaagatgaatgcagattacactgatcttatgtgttacaaaattggagaaagtctcgag

SEQ ID NO: 92 - DNA (cDNA), 354 bp; double-stranded, linear
gaattcggccttcatggcctaatttcatctttttttcctggtgctgcataaacatatattaaatgttgttactgatccctagtactgttgatttgtgacccttctcctgagggagactaaagctgcttgagctaaaggcttttgagacatcccatacggttccctgaacaaagttttctctcctgacctcagttctcttgatgaccttggcaagtgggcccgactagttggacactaatgaggcatcgtaacatgccggccccatcctgtccattctgttctctttgccatctagcattcagtgttgtgtcttcctagtgggcatgaagacggctttaaaaccatccactcgag

SEQ ID NO: 93 - DNA (cDNA), 493 bp; double-stranded, linear
gctgaaaatgcaaaacatgaagaaagtgattgaggcaattcgagtggagctggttcagtactgggaccagtgcttttatagccaggagcagagacaagcttttgcccctttctgtgctgaggactacacagaaagtctgctccagctccacgatgctgagattgtgcggttaaaaaactactatgaagttcacaaggaactctttgaaggtgtccagaagtgggaagaaacctggaggcttttcttagagtttgagagaaaagcttcagatccaaatcgatttacaaaccgaggaggaaatcttctaaaagaagaaaaacaacgagccaagctccagaaaatgttgcccaagctggaagaagagttgaaggcacgaattgaattgtgggaacaggaacattcaaaggcatttatggtgaatgggcagaaattcatggagtatgtggcagaacaatgggagatgcatcgattggagaaagagagactcctcgag

SEQ ID NO: 94 - DNA (cDNA), 293 bp; double-stranded, linear
gaattcggccttcatggcctacacacggccaaatttgagggcattctcacatgtgttcttctctcaaaaccactggggttgacagatccaggaggctaaaaaaaagtgacctctataattctttaaaggtgctatttttagaanattgtataatttattcacagtatatctaaaacagaattaaggacaattaaaatatcttatgtgacagcctttatgtctagtcacatttgatgaaataaaaaacttctgaatctgaatagaagttctactgtntcaggattgaactcgag

SEQ ID NO: 95 - DNA (cDNA), 280 bp; double-stranded, linear
gaattcggccttcatggcctaaaaagacaggaaaataagtctctttgtatccttattaatcatttgaaattatgctataatattttttaaaactcacctgtttggttctgggtgaagcagttcctgaaggagtgttttgtcagaatatattgttaggtgaatagagggttctgtggccaagtaagtttgggaaatagtgggttagacaaagttgagttactgttggcctttcagacctttgatacgctaatgtgcattttaaatctccaagaagctcgag

SEQ ID NO: 96 - DNA (cDNA), 279 bp; double-stranded, linear
gaattctccagcctgggtgacagagtaagactccatctcaaaaacaaaaaaacccaacaggataaaatttaataggagtaaatataaagttctacgttttgattttaaaaatctaggtactgtatagtgtgtattagttggggttccttttttgaaacttaatcttgcctataaaacacaaaagagtttaagatgatattgagactcctcctgtcctcattccttttccttcctaatagctcagtcctgaagctcttaggtgaggcagaacaactcgag

SEQ ID NO: 97 - DNA (cDNA), 307 bp; double-stranded, linear
gaattcggccttcatggcctaggataccttcatttcaaggagcctctttacagtaactgggctaaacattttgttgtcgtccgtcggccttatgtcttcatctataacagtgacaaagaccctgtggagcgtggaatcattaacctgtccacagcacaggtggagtacagtgaggaccagcaggccatggtgaagacaccaaacacctttgctgtctgcacaaagcaccgtggggtccttttgcaggccctcaatgacaaagacatgaacgactggttgtatgccttcaacccacttctagctcgag

SEQ ID NO: 98 - DNA (cDNA), 292 bp; double-stranded, linear
gagctgtgtcagcatcgatcaggggtctgtagacaaaaattcccaaagatttgagactttattgggggaaacagatcactggcggggaataagccacaggccaaaggaggaaatgctgggaccagaagtcccgcttgccgccttttgctaaaagttccgcacgcctgctcggcgtgggcgcaagcatagtgtcgtcggggctctgcgacgtctgattggctctctgcagtgcaccgtcgaggtagaaggctcagctcctagtcgctcccaaattactttgttggtgctcgag

SEQ ID NO: 99 - DNA (cDNA), 397 bp; double-stranded, linear
gaattcggccttcatggcctagcttgaggaatgacccaactctctctggaaagtcactttgcctctctgttctggttctctcattttataaagtgccttcttcctttctgcatttataagtaaacatgagaaaaatctgaaaagacttcttcaggatgtttaaggaaacaaatgttgctttccttgggttgggtcgtttcataagagtgatgtttgccataaaactggagcctcatagacgatcctgcagggaggaagctttccttggtcacctgactcatgtgtttatatatagtatagaggagaggtattccaaaagacccgtcgcttttcctgtgtcccacagctgcctgtagagttgtggcaccataaactttagcagctggaaatcctcgag

SEQ ID NO: 100 - DNA (cDNA), 370 bp; double-stranded, linear
gaattcggccaaagaggcctattaatttaataaagccatatcatacctctctttaacattgttaaaaggaaactgtgtgtgtgtatttgtgttaatgttaanttctcttcatttttgtgcttggggggctgtttatttgaggatggtcggggggcgggtgggtcagacccatccatcccccatggaagaccagacccatccatcccccatggaagaccattcccgtgtgttcagactggcagggtacttccatagacaggaacattctggatgctctgatgctgaacactaccagaatcggccatggatttgctttgagcaaacaccccgcagtcaggacttactcctggaaaaaggacatcttctcgag

SEQ ID NO: 101 - DNA (cDNA), 340 bp; double-stranded, linear
gaaaaaaatagacaaaactatgatgtaaaaatgcttaaaaacaattattcctctctgctaattttaatgcaaaataaatgatgctagcatttaatatgtttatatgatcttgtttttaggattgaaattttaatacaatggccttttgtaactatttttactattatagctcaggtgtttgaattctctctaccccacctatcacccctatcccctaacaaagagtctggcttcataaatactgttgaatgaaaattggttctctaaatggttaacaagatgaatccacataaatcataattcagtactgaggaaccgaatttatacccagcgtctcgag

SEQ ID NO: 102 - DNA (cDNA), 370 bp; double-stranded, linear
gaattcggccttcatggcctagattgaattctagacctgatgtgagaatgatgggcttggagtgttctggaaatagctgggaggcctgtgtgtttaggagcgccttaaacagtaggatataagggcagagaagtagctgggaactgagaagaactttggctgttattctagtaagactgaaaatttcaggtgggatttgaacagagatgtgtggtgatctgacttggttcattctgctgtggtgaagagactggaggtgcggggcaagtatggaagcatggagaccattaatttatgggggcaatggtagagggaagagaaacaatgctattaactggagtaggagcacacagagaacaagccactcgag

SEQ ID NO: 103 - DNA (cDNA), 270 bp; double-stranded, linear
gcgattgaattctagacctgccttgagatcaccgagtgcttcatctctgacagttcctctgaccagatgaccacaggcaccaacgagaacgccgacagcatgacatccatgagcacaccctcagagcctggcatctgccgctttaccgcctcaccacccaagccccaggatgcggaccggggcaaaaacgtggctgtgcccatccctcaccgggccaacaagagtgagtgctcagaccacctcccaggcagtgcccccccgactctcgag

SEQ ID NO: 104 - DNA (cDNA), 286 bp; double-stranded, linear
gaattcgccttcatggcctaatatgcttatgaatatgatgttgatggacagctccaaacagtttacctcaatgaaaagataatgtggcggtacaactacgatctgaatggaaacctccatttactgaacccaagtaacagtgcgcgtctgacaccccttcgctatgacctgcgagacagaatcactcgactgggtgatgttcaatatcggttggatgaagatggtttcctacgtcaaaggggcacggaaatctttgaatatagctccaaggggcttctaactcgag

SEQ ID NO: 105 - DNA (cDNA), 291 bp; double-stranded, linear
gaattcggccttcatggcctacttaaatcttagatgctaatgggagaaactgattttttaaaaaacagggaaactaattaacattttatcagatatgctatgaagtaaacagttgaagactgacagtccagtggataccgaggagttcctttagataccctggtgaggtaaggacacaggcaaggggagagctgagacctgaatatgaggagaagccaggcgagcacacaatagggcagaaaggagcagtaggtcaaagcctgaggcaggagagagcttgactgactcgag

SEQ ID NO: 106 - DNA (cDNA), 339 bp; double-stranded, linear
gaattcggccttcatggcctagaaatggttctgaaagcgacagtagagagatgcagttgtgatgatttcaacaacctggatgttttctttctcctctttgcttccattcatctctgttggctgctgttgatggagtcagacagtaaacacgtggcttggataacacccatcatcctatgaagaatatagggagtacttgttctctgttgattcaacttttatgtctccagtaacattgcgcttatgaaggtacctgtatttgtatggactctgaataaagaagaattcatttgtttagcaagtattagttcagcaaccactgagaaacaagcactcgag

SEQ ID NO: 107 - DNA (cDNA), 439 bp; double-stranded, linear
gaattcggccttcatggcctacatcatgtcaaagagtactacatacagtttggaatctcctaaagacccggtactaccagctcgtttcttcactcaacctgacaagaatttcagtaacaccaaaaattatctgcctcctgaaatgaaatcatttttcactcctggaaaacctaaaacaaccaatgttctaggagctgttaacaagccactttcatcagcaggcaagcaatctcagaccaaatcatcacgaatggaaactgtaagcaatgcaagcagcagctcaaatccaagctctcctggaagaataaaggggaggcttgatagttctgaaatggatcacagtgaaaatgaagattacacaatgtcttcacctttgccggggaaaaaaagtgacaagagagacgactctgatcttgtaaggtctgaatcggagctcgag

SEQ ID NO: 108 - DNA (cDNA), 298 bp; double-stranded, linear
gaattcggccttcatggcctaattgaattctagacctgcctcgagaggcaggtctagaattccaaatgtaaaatttactaaggcttttcatgtggaagtagaatgcatatatctttcttgatataacaaatgaatttggttgtagctaacgtgttgtactagtaaaggtccacctgctaaactttttcttttttgttgaggtatagacagtagagtgataccgatacatgaggaaaatgagaactggaatgcaggccaaaagctggtcctttccagatgaatgtaaccaagactcgag

SEQ ID NO: 109 - DNA (cDNA), 355 bp; double-stranded, linear
gaattcggccttcatggcctacactctcaaatatgtggcctttaacgggaccaaagtaggaaagcagatagtggaaaacttctctcccaatcagaccaagttcacggtgcaaagaacggaccccgtgtcacgctaccgctttaccctcagcgccaggacgcaggtgggctctggggaagccgtcacagaggagtcaccagcacccccgaatgaagcttacaccaacaaccaagcagacatcgccacccagggctggttcattgggcttatgtgcgccatcgccctcctggtgctgatcctgctcatcgtctgtttcatcaagaggagtcgcggcggcaagtacccaatactcgag

SEQ ID NO: 110 - DNA (cDNA), 407 bp; double-stranded, linear
gaaaaaactgggtcaaagaattacggaaaatgttgggaaatgaaatctgtttatgtatagttggtaataaaatagacttggaaaaggagagacatgtttccattcaagaagcagagtcgtatgcagaatctgtgggagcaaaacattatcatacttcagccaaacagaacaaaggaattgaggaactctttcttgacctttgtaaaaggatgatagaaacagcacaagtggatgagagagcaaaaggcaatggctctagtcagccgggaactgcaaggcgaggtgtacagattattgatgatgaacctcaagcccagaccagtggtggagggtgctgttcttctggataactgttcacgcctaagaaattaaaagacagaacaaaactgtggatcattgccctcgag

SEQ ID NO: 111 - DNA (cDNA), 395 bp; double-stranded, linear
gaattcggccttcatggcctaaaagaaagtacattaaagcaacttgcatctcaaaacaatacatttctctggttgaagttttagtgaaaatcgatttattcctcctctgagttttacccaatgggtaaagttgtctaaatatgggattccttagaatccatcctccttcccaagcatttccccatgtttccttccacccccaaattcttaccccatttcaggcagagctgagcaaacataagccttctctgaagtattgagggaaagtctgctaaacggctaaactacttaaggagctaacagaaaaggttgtatcagagaaacagtggagaaacacaggtttctaattatatctggcactggagagaatgtcaaaggtattggcccagctcgag

SEQ ID NO: 112 - DNA (cDNA), 301 bp; double-stranded, linear
gaattctagaaactacagtagtgggacacataacatagaagtaatcgtccaggattctgctggaagaagtaagagtgttcaccacatattttctgttcaagagaataatcatctcagttttgatcccctggcatcatttattctccgtactgatcactacatcatggcccgggtcctttttgtgctgattgtgctgagccagctcaccattctcattatttttagatatcgaggatacccagagcttaaagaaccttcagggtttataaatctgacctcattttctcttcaatgtctcgag

SEQ ID NO: 113 - DNA (cDNA), 268 bp; double-stranded, linear
gaattcggccttcatggcctaagcatgctgtcttgtgatggtgatttcatgtgttttctgcatgggattattaacggcatccattttcttgggcgtcaagttgttgcaggtgtccaccattgcgatgcagcagcaagaaaaactcatccaacaagagagggcactgctaaactttacagaatggaagagaagctgtgcccttcagatgaaatattgccaagccttcatgcaaaactcattaagttcagcccataacagcagtctcgag

SEQ ID NO: 114 - DNA (cDNA), 260 bp; double-stranded, linear
gaattcggccttcatggcctacccgcatcccagctctatttaaaaaaataaagaagaagataattcatttccttaagctgcccttacactattagtcaggaatgtttgtgttcacttccactacataccttacgatctcttttgctttgctttttttcagtcaagtctctatttatgaggtggacaagcaagattgtcgcaaattttgcactactggcatcgatggagccatgacaatttgggatttcaagaccctcgag

SEQ ID NO: 115 - DNA (cDNA), 259 bp; double-stranded, linear
gaattcggccttcatggcctaaacattttctgaaaaacgtgatagaaagaaggaggagctgtttctaggagggaaataaataatttggcaggagactttttgaactagatatctattgaataacaaagtgacaatgttccccatcctctcatttccattcccaattttacttctcgtcccaattcaaatcattcttacttatgatcggcgctatgtcagtgcctctcagctggtcttcccagacccagtcaccctcgag

SEQ ID NO: 116 - DNA (cDNA), 238 bp; double-stranded, linear
gaattcggccttcatggcctaattacatttatgcaaccaagctatcaaaaggactggctgtccttgggaatgaaacgtaacaaaatcgtcaatagagtattattggaaaagattgttttcagtcatgaactagctatttaaatgagaaaacaaatgtaatgatgctttctgtcatgattttataaataaatgtcaattgtaggaaattggaaaaataaatgaaaaagaaaaactcgag

SEQ ID NO: 117 - DNA (cDNA), 279 bp; double-stranded, linear
gaattcggccaaagaggcctaccctagacctgttttctgttctctactcttgaaatgctaatgaccttcatgaccagagtccgctattgcagtttgtggttgacaggcatctctcactcactgtgctgcaactcaactctttatcttcaaccaaacagggcctccccgcagctttcccactgccactcagtggcactccatccagggtttccaaagtgtaagaccccggaatttatctttgacacttccatctccctccacccctcatccaattcatca

SEQ ID NO: 118 - DNA (cDNA), 656 bp; double-stranded, linear
gaattcggccaaagaggcctagttataatgatggaagaagtggaaaaactttgtgatcggcttgaactggcaagcttacagtgcttgaatgaaacactcacatcatgcacaaaagaataggaaaggctgctttggaaaaacagatagaagaaataaatgagcaaatcagaaaagagaaagaggaagctgaggctcgtatgcgacaagcatctaagaacacagagaaatcaactggtggaggtggaaatggaagtaaaaattggtcagaagatgatctacaattactaattaaagctgtgaatctgttccctgctggaacaaattcaagatgggaagttattgctaattacatgaacatacattcttcctctggagtcaaaagaactgccaaagatgttnttggcaaagcaaagagtctccaaaaacttgaccctcatcaaanagatgacataaatataaaggcatttgataagttcaanaaagaacatggagtggtacctcaagcagacaacgcaacgccttcagaacgatttgaaggtccatatacagacttcaccccttggacaacagaagaacagaagcttttggaacaagntttgaaaacatacccagtaaatacacctgaaagntgggaaaanatagcagaaagtctcgag

SEQ ID NO: 119 - DNA (cDNA), 523 bp; double-stranded, linear
gaattcggccaaagaggcctagagacaaataggtgatactgaattttatactgttttctacttttccattaaaacattggcacctcaatgataaagaaatttaaggtataaaattaaatgtaaaaattaatttcagcttcatttcgtatttcgaancaatctanactgttgtgatgagtgtatgtctgaacctgtaattcttaaaanacttcttaatcttctagaagaaaaatctccgaagagctctctctagaagtccaaaatggctagccattatgcttctttgaaaggacatgataatgggaccaggatggttttttggagtaccaagcaaggggaatggagcactttaagggcgcctgttagtaacatgaattggaaatctgtgtcgagtacctctgatctaaacggtaaaacaagctgcctggagagcagctgtacctaacaatactgtaatgtacattaacattacagcctctcaatttcaggcaggtgtaacagttcctttccaccagatctcgag

SEQ ID NO: 120 - DNA (cDNA), 111 bp; double-stranded, linear
gaattcggccaaagaggcctaatttcttcctgtgatatgagaatttcttttctttcagcagctttacctgcatttggctttggcttttgcaatcggcccctcattctcgag

SEQ ID NO: 121 - DNA (cDNA), 579 bp; double-stranded, linear
gaattcggccaaagaggcctaaccgcggccgctacttcggcctctttggaaaaaaaaaagtgaaagaaaanatcacaatacagggaaaagtgagctaaaaatcccggcattaaaaagcccttgatgtggtcctgaatcggctatttctatctgttccctgagcctaacctcagcgctggcctctctaaacctcttttcagtcctctcattttgaaaacagggcccattacacattctctgaaagcttgctgagtgatttaaccacatagtctaggggaggcactcatcaaacataaggcctctctttttgatttttatcctatagtggtatctatctagaggctggtgaagacagtgtggtggaaggaaagtgggaaggatacactgaaataggacatagacgtagaggggagtcgatggtcatctggcttgatagggaaagttagagagctctcctgaaccacagttacagagcttgggattataacacacacagccccagagaaaacactttgtttaccatatttcctcttctgctggggctctggcaccttaattggtcaaaaggcagcactcgag

SEQ ID NO: 122 - DNA (cDNA), 257 bp; double-stranded, linear
gaattctaggaatgggtcgggaagttgagaatcttatattagaaaatacacaactgttggaaaccaaaaatgctttgaacatagtgaagaatgatttgatagcaaaagtggatgaactgacctgtgagaaagatgtgctgcaaggggaattggaggctgtgaagcaagccaaactgaaactagaggaaaagaacagagaattggaggaagagcttaggaaagctcgggcagaagctgaagatgcaaggcaactcgag

SEQ ID NO: 123 - DNA (cDNA), 421 bp; double-stranded, linear
gaattcctgtaactcggaaaagatatcagaggaatgttcgtggcatcagagagaaagatgagagctcaccaggtgctcaccttcctcctgctctttcgtgatcacctcggtggcctctgaaaacgccagcacatcccgaggctgtgggctggacctcctccctcagtacgtgtccctgtgcgacctggacgccatctggggcattgtggtggaggcggtggccggggcgggcgccctgatcacactgctcctgatgctcatcctcctggtgcggctgcccttcatcaaggagaaggagaagaagagccctgtgggcctccactttctgttcctcctggggaccctgggcctctttgggctgacgtttgccttcatcatccaggaggacgagaccatctgctctgtccgccggtcactcgag

SEQ ID NO: 124 - DNA (cDNA), 123 bp; double-stranded, linear
gaattctagacctgcctcgagaaaatgaaagtcttttctcaaaaaacttcttcccaggtctgtgaagcagcacagtggccccttctggctctcaccttgtacctcgtccttgtttgcctcgag

SEQ ID NO: 125 - DNA (cDNA), 303 bp; double-stranded, linear
gaattcggccttcatggcctaagatggcgtctcacaaatcatatgccaattactgaaattggaggtgaaaatattctagatttattgtgggatatatatattttatggtgtatggctcccaacaccacatgccactgaactatataaaactttatgtcagaacacttacttgtgtcatatgtaaccctcttgcaaataatattcccttactacagatctgtcccactgttctcagaaaataaaacatgggaacgttggaatgtctccttgctataagatattgaattctagacctgcctcgag

SEQ ID NO: 126 - DNA (cDNA), 508 bp; double-stranded, linear
gaattcggccttcatggcctatgaagacaaagctaacttacaaaagcagctggttgaagcaatgaatacgcaattagaactttcagaacaacttaaatttcagaacaactctgaagataatgttaaaaaactacaagaagagattgagaaaattaggccaggctttgaggagcaaattttatatctgcaaaagcaattagacgctaccactgatgaaaagaaggaaacagttactcaactccaaaatatcattgaggctaattctcagcattaccaaaaaaatattaatagtttgcaggaagagcttttacagttgaaagctatacaccaagaagaggtgaaagagttgatgtgccagattgaagcatcagctaaggaacatgaagcagagataaataagttgaacgagctaaaagagaacttagtaaaacaatgtgaggcaagtgaaaagaacatccagaagaaatatgaatgtgagttagaaaatttaaggaaagccaccctcgag

SEQ ID NO: 127 - DNA (cDNA), 713 bp; double-stranded, linear
gaattcggccttcatggcctagcggcagtccagatcacggttactgtgacctgactggagaaaaattatgtgtctgcaatgatagttggcaaggtcctgattgttctttgaatgttccctctactgagtcttactggattctgccaaacgttaaacccttcagtccttctgtaggtcgggcttcacataaagcagttttacacgggaaatttatgtgggtgattggtggatatacttttaactacagttcttttcaaatggtcctaaattacaatttagaaagcagtatatggaatgtaggaactccatcaaggggacctctccagagatatggacactctcttgctttatatcaggaaaacatctttatgtatggaggcgccccaaggcccgacccctcccccaaaggggcagtccccttcttgcaggtctcagcttgcggggtggggggagtcatgcccaggggaggagactttttatctggaggggagagaaggattctaggggtgtggagttggagaaagaggcttccttgagccacccttcccaccccagcccttgntggtccctaggccaagccaccaagtgaaaccttccaggatactagcccgccagctgtgggccccagaaagccagcctgccttttagcacttggatacacacagacccacggagctctctgtgtttggcctctcacacacacacaactcgag

SEQ ID NO: 128 - DNA (cDNA), 277 bp; double-stranded, linear
gaattcggccaaagaggcctaagagattcaggacctgcagagtcgccagaagcatgaaattgaatctttgtatactaaactgggcaaggttccccctgctgtcattattcccccagctgctcctctgtcggggagaagaaggagacccactaaaagcaaaggcagcaagtctagtcgcagcagctcattgggcaataaaagcccacagctttcaggcaacctgtctggtcagagtggaacttcagtcttacacccccaacagacctccacagtcgag

SEQ ID NO: 129 - DNA (cDNA), 670 bp; double-stranded, linear
gaattcggccttcatggcctaaggctaccgatattggagaagctaactatgggttttaccacacgtaacagctttttggtgaaatcagttgttatactaataagctttcctctaattgatttgagttttggtttttgtgtttgtatttgcgggttttgtctcttttgttttcttgtttttagtaaattggtttttcttcaatgtattttcttaaagtagtctagctttacccagtttccttggcaaattgaaatttaggccatgaaggccgaattcggccttcatggcctactcagcctccccaagtagctgggactacaggcgtgtgccactattctcagctgatttttgtatttttagtggagacgggtttttgccatgttagttggccaggatggtctctctctcgacgtcgtgatccgcccgcctcggcctcccaaattgctgtgatgacaggcgtgagccaccccgcntggcntgtcctacctcttttttaagacctcttcctgtaagcactggataatctacttctagtaatgtgaaactgactatatnttgaattcatatgttttcaatcaacctgttgcagtttatatttcacaccctgctcccttttgacagtttaagtacagatagtctcagcagttctggagaccatgtaaagctcgag

SEQ ID NO: 130 - DNA (cDNA), 462 bp; double-stranded, linear
gaattcggccttcatggcctacgactctgctctatttaccactatcaggccaatcctcctgacatgctgttaatatttagaaatatttctccaacattcagagtgcctgggtaccacacatggatgcgactaagattcttaagtctggtttctaagagcttcttcaatgtctccaactatcttttcaggctcatgtttgagaccttcctttcaagaataatttgcttgtgatctggttcaagctgaacagagattttcagatgactcccaaactatctgcaacacatcagccctattaactcttctcagaatgctcatacagaagccatgccagtgcacaaaagccacttctgacacctggccctgtctgactcatggatttcttccaggattgctctttctatctgctttaaacctccttgtcaattgactttccttggctcccaacccactttactcgag

SEQ ID NO: 131 - DNA (cDNA), 535 bp; double-stranded, linear
gaattcggccttcgtggcctanatattctaagcattcaatttgtcagtttctgagattttctttccatcttagttttttagaagtcagaaaatgacttttcacattcagttagggtatataacaatgttaacgtaagtttatgagctgagtaggtagttaataaacatccttttaagttgtaatgctttgaaatagcatattaaagggttgcaagggaaaattggaacatcagtgtgagttattttacagtcatttgtaggtctgtttgtgaccttggccttttcacacttgtttgtctatcacctttagtatattactctttggcacaggttgtctaatcacattaatttttgcatcaaaaatcccttggtttagtgattcttaatgatgtttattttggaaagtcatggacctgaattctttgagtagttcatgaaaaccatatacctttcccagagaaatggggtgcatataatttcaggaagttcaaggtagggaaaacaagctaaaaatcccaacttatttcatctcgag

SEQ ID NO: 132 - DNA (cDNA), 401 bp; double-stranded, linear
gaattcggccttcatggcctaaggggatcatcaaagatgttggacaccttgtgttcaaatcttggttcaggtgcggcctgtgcagatcggctttttggtttggttgtcttggcctggataccagtggagaagatgtcatccatatcatcatcaaatatagacttggtttccactttctttttggacttttcttttggttttacagttaagtcagcaaagatatcaatgttatcatcaaataaattagattccaatgttttctccttctctctggttttctgagagggtttaattgcttccgtagcaaatatatcatcctcaaaaatatcttgtgttgttaatatgacatcctgctgactactggattttgtctcattcttcttgactttctgatcctcgag

SEQ ID NO: 133 - DNA (cDNA), 497 bp; double-stranded, linear
gaattcggccttcatggcctagtagatgaactagaagatggataaacgaagatagataaaatgaagaaaaacaaaagtcaaggagaactcaggcgtccaagagtgtgtaaacaacttctggtgtgagacgcgctacattgcgctaaatggcctgtgcgcttctggtttttcccttcctctgttgattttttatagttgtcttttattttaaacacgcctcccccccccctttttaaactgattttaccatcactctctctagccctgcctccctagaattagctgcttcttacctcccttggatctggaacttaaatattaacgtgtatataagttaatagtaagtagaccgtgaatttagaagagtaaaacagaatcatgagtacgtagtcactgtggccccttttttgctggatttcaagttcgtaagcatttttggaagagagtcgaaggggaaggggtggcttgccagtcagttgagtgatgcatggctcgag

SEQ ID NO: 134 - DNA (cDNA), 362 bp; double-stranded, linear
gaattcggccttcatggcctaggctggtcattgagagtgttggtgcagtcaaactggaacacgatgtgattggtaaacatgtgcttgatacatcgaacaaaatattctgtctctgcttctgtaagttgaacaggctcagaagacttgaacaagggtcctatattcagaaactcaggaatggcagccaattgttcttggggatatatttctaatgaagtgctagactatccaattacttaatttcttatacctttagataatcagtatgaaaagttcccatttataatggaaatgaaaattcttaactaaactatacatgtaatatgtatttctagaagagaataaaaacccaagtcctcgag

SEQ ID NO: 135 - DNA (cDNA), 377 bp; double-stranded, linear
gaattcggccttcatggcctaccccaatcaatggatcctcaactccaaatccaaagatagcatcttctgtcactgctggagttgccagttcactctcagaaaaaatagccgacagcattggaaataaccggcaaaatgcaccattgacttccattcaaattcgttttattcagaacatgatacaggaaacgttggatgactttagagaagcatgccatagggacattgtgaatttgcaagtggagatgattaaacagtttcatatgcaactgaatgaaatgcattctttgctggaaagatactcagtgaatgaaggtttagtggctgaaattgaaagactacgagaagaaaacaaaagattatgggcccacctcgag

SEQ ID NO: 136 - DNA (cDNA), 333 bp; double-stranded, linear
gaattcggccttcatggcctaagcaaacttcatgcagctggtggaactagatgtgtctcgaaatgagattcctgaaattccagaaagcatttcattctgtaaagcactgcaggtagctgacttcagcggaaacccactgactaggttgccagaaagctttcctgaattacagaatttaacatgtctttctgtaaatgacatctcactacagtctctacctgaaaatattggcaatctttataacctggcttcactggaactgagagagaatcttcttacatatcttcctgactctcttacccagctgcgaagactagaagaacttgactcgag

SEQ ID NO: 137 - DNA (cDNA), 309 bp; double-stranded, linear
gaattcggccaatgaagcctactttagtattttggcacttcctaattgacaccttgggagactgcaggaagggaacgagaatcattnntaggntatttgtgtgtgtgtgtggtttttttttttttttggaagacagagtctcacacttttgcccaggctggagtgcagtggcgtgatctcggctcactgcaacctctgcctccagggttcaagcgattctcttgcctcagcttcccgagtagctgggattacaggcacacgccacaacgcctggctaatttttatatttttagtagagacagtctcgag

SEQ ID NO: 138 - DNA (cDNA), 599 bp; double-stranded, linear
gaattcggccaaagaggcctaaactcagaatggtgctacttgaagactctggatctgctgacttcagaagacattttgtcaacctgagtcccttcaccattactgtggtcttacttctcagtgcctgttttgtcaccagttctcttggaggaacagacaaggagctgaggctagtggatggtgaaaacaagtgtagcgggagagtggaagtgaaagtccaggaggagtggggaacggtgtgtaataatggctggagcatggaagcggtctctgtgatttgtaaccagctgggatgtccaactgctatcaaagcccctggatgggctaattccagtgcaggttctggacgcatttggatggatcatgtttcttgtcgtgggaatgagtcagctctttgggattgcaaacatgatggatggggaaagcattattgcaatcacaatgaagatgctggcgtgacatgttctgatggatcagatctggagctaagacttagaggtggaggcagccgctgtgctgggacagttgaggtggagattcagagactgttagggaaggtgtgtgacagaggctggggactgaaagaagctgaactcgag

SEQ ID NO: 139 - DNA (cDNA), 541 bp; double-stranded, linear
gaattcggccttcatggcctaaccttcctgaatatctgccgtttgtcctgcaagaaataactagtcaacccaaaaggcagtatcttttacttcattccttgaaggaaattattagctctgcatcagtggtgggccttaaaccatatgttgaaaacatctgggccttattactaaagcactgtgagtgtgcagaggaaggaaccagaaatgttgttgctgaatgtctaggaaaactcactctaattgatccagaaactctccttccacggcttaaggggtacttgatatcaggctcatcatatgcccgaagctcagtggttacggctgtgaaatttacaatttctgaccatccacaacctattgatccactgttaaagaactgcataggtgatttcctaaaaactttggaagacccagatttgaatgtgagaagagtagccttggtcacatttaattcagcagcacataacaagccatcattaataagggatctattggatactgttcttccacatctttacaatgaaacaaaagtctcgag

SEQ ID NO: 140 - DNA (cDNA), 403 bp; double-stranded, linear
cttcatggcctagtggttcttctgaaatcggccttcagacacctgtctttggtagtaccaatatctaagaagtggtttcagttcaattttgttttcctccatgccagagagaagccacagtttcctaagctggggaggaggtatatccttcaagagatcggcttgttagaatagaccacttaacaccatatgaaaaagcaacagactgaaacatggatgtcctcaagaagggctgctgacacctatgatttggcaaggagataaataacagaatgtgcaaagggtcataagagtgcagacaccctaatgtctgttggctggaaggtcagagcagttcaccagtgaaaatgggtacgccatgaaggccggccttcatggcctataggccatgaaggccgaattc

SEQ ID NO: 141 - DNA (cDNA), 439 bp; double-stranded, linear
gaattcggccttcatggcctagtcctcatctgctggcattttgtggggtgttagtgccaaacttgaataggggctggggtgctgtcttccactgacacccaaatccagaatccctggtcttgagtccccagaactttgcctcttgactgtcccttctcttcctacctccatccatggaaaattagttattttctgatcctttcccctgcctggtctagctcctctccaaacagccatgccctccaaatgctagagacctgggccctgaaccctgtagacagatgccctcagaattggggcatgggaggggggctgggggaccccatgattcagccacggactccaatgcccagctcctctccccaaaacaatcccgacaatcccttatccctaccccaaccctttgcggctctgtacacatttttaaacctggctcgag

SEQ ID NO: 142 - DNA (cDNA), 292 bp; double-stranded, linear
gcgattgaattctagacctgtgtgtctagctgtgatggaatctgaaatgaagtttgacaaggaccatgatggactcattgaaaatggaggctatgcagaccagacctatgatggatgggtgaccacaggccccagtgcttactgtggagggctgtggctggcagctgtggctgtgatggtccagatggctgctctgtgtggggcacaggacatccaggataagttttcttctatcctcagccggggccaagaagcctatgagagactgctgtggaatggccgcttactcgag

SEQ ID NO: 143 - DNA (cDNA), 457 bp; double-stranded, linear
gaattcggccttcatggcctagggaggctgaggtgggaggctcactggaggccaggagttcggaaccagcctgagcaacatagggagacctcagctctacaactgaaaaaaagatagccaggtgtgttcatggtggcacctgtctgtattccagccgcttgggaggctgaggcaggaggtttgcttgagtccaggagtttgaggttgcggtgagctacacaatgagctatggtggcactactacactccagcctgggccatagagtaaggccctgtctctaactggaagtccaaagagggatctacttcctagactattaatttaatagatcaataaattaatcaagaatatgatttttttctcatctttctctgtagtcatattttatacagactttttgtttaagtaatctctctttatgggcagacaatgatttcagaaacaccctgcctcgag

SEQ ID NO: 144 - DNA (cDNA), 388 bp; double-stranded, linear
gaattcggccttcatggcctagtcagccgtgactgcaccaccatactccagcctgggtgacagagcgagatcttgtcttaaaacaaaacaaaacaaaacccagacttcctataattcctaaaaataaatgtgggtttgagaggcctaccttgaaatgtacaagatcctggccagacttcacctatctaacaatatgctagtaactatttgttgacatgtcttaaagaaatgttcatcagggcctcagaaagcaaggcagagaacaggtccctgaaatttactagcttgcaccaaaccatcagataaagataggttaatatttgacagaaaaaactcttcaaaaagagacagtgaaatactcttgagatgaatccaggcggctctcgag

SEQ ID NO: 145 - DNA (cDNA), 303 bp; double-stranded, linear
gaattcggccttcatggcctaggcagtggaggcctctgtaattctagcatacaggtggcaagttattacattatttctttcctcctgtctacctgcagttggttttatgtggggcgttagtacacttcccaaagggcttgcccgcaggtgagaggtgcacattgaactccctcaccaggcagatgggaagtgtggccatgagagagagcttcaggggccctgggtttatgacatcgctgggccaggaatgaggttaatatttttaatggcgaagggtgagccccgttattacccgagctcgag

SEQ ID NO: 146 - DNA (cDNA), 376 bp; double-stranded, linear
gaattcggccttcatggcctactggatggcatctacttcgtatgactattgcagagtgcccatggaagacggggataagcgctgtaagcttctgctggggataggaattctggtgctcctgatcatcgtgattctgggggtgcccttgattatcttcaccatcaaggccaacagcgaggcctgccgggacggccttcgggcagtgatggagtgtcgcaatgtcacccatctcctgcaacaagagctgaccgaggcccagaagggctttcaggatgtggaggcccaggccgccacctgcaaccacactgtgatggccctaatggcttccctggatgcagagaaggcccaaggacaaaagaaagtggaacaactcgag

SEQ ID NO: 147 - DNA (cDNA), 412 bp; double-stranded, linear
gaattcggccttcatggcctaatggaaaggacaaggaaaagggagaaggggtgagagtctgtcctaggggccaacgagaacagtgagctgtttcaggggagccatttccttgtccatgctcacaagcctgtggattcttccccctctgcaggaaattacctgatgttccaaaccccctccagatcctgtatatccgcagcatctcccctttccctgagctggaacagtttctacaggacactatcaagaggtactaggggcctggaggtttgggctccaagagaagcttgacagagcccacgcccgacccctacttctgtttcttcctaaggtataatctgcagatgttggaagctgagggcagcatgaagcaggccctgggtgaactgcaggcacagcagcccccctcgag

SEQ ID NO: 148 - DNA (cDNA), 335 bp; double-stranded, linear
gcctggccatccggagagctaagaacctcaggcggctgctgtacgtntcatgcaacccccgggcagccatgggcaactttgtggacctctgcagagccccatctaaccgggtgaagggcattcccttccggccggtcaaggctgtggcagtggacctgttcccgcagaccccttcttttttcatacttatatgaaagactacatacttaaaatactggtgattatatttaggacctgaaatcataagattgtggtcttgctttttacttatttttgtatcttagcgatgtctagagttaataagtgttgcttttctaatcacagcaaatctcgag

SEQ ID NO: 149 - DNA (cDNA), 482 bp; double-stranded, linear
ggattcggccttcatggcctagtggggcactaggatcatcatttgggtgagagccctcggcaatggtggagagggagaagttatcattgtggagctcagatggggtccggaatttgttggtcctacgcagcttggtattctccgtcttgagcaggtagagcttcttggcaaagaacaccgtcatcatgaagagcaggagcaggacgagggcagccgagcccacggccacgcacatcacctggaagtcggtgatgatggactcgcagcgcatccccttgtgccagatgtagtcctgcgtgttgcacctgcagaaggcccctatgttctccaccaggtagcactggccgccattgtgacagtaacttgggaagaggtcgcacactgaccggcaggagccgttatgccgcacaaagccactgcggcactcagtgccattttcactggaggccaagtccctgcctggctctccttaggccatgaag

SEQ ID NO: 150 - DNA (cDNA), 277 bp; double-stranded, linear
gttccttactaactttaatggccacaacatttaggcgaaaggggggcaatcattggtggtttggcattcgcagagacttctgtcagtttctgcttgaaattttcccatttttaagagaatatgggaacatttcatatgatctccatcacgaagatagtgaagatgctgaagaaacatcagttccagaagctccgaaaattgctccaatatttggaaagaaggccagagtagttataacccagagccctgggaaatacgttccccccctctcctcgag

SEQ ID NO: 151 - DNA (cDNA), 272 bp; double-stranded, linear
gctcgcccactttatgaagagcgatttcacggctgcttgaaccattcgaatttggatttgtgttcagcactttaaaaggttcaactttttgcttctacccagattggtctcaggtctgtcttctccagatgaccggtggtttcctgagctgcatcttgggcttggtgctgcccctggcctatggcttccagcctgacctggtgctggtggcgctggggcctggccatggcctgcagggcccccacgctgcactcctggctacaatactcgag

SEQ ID NO: 152 - DNA (cDNA), 308 bp; double-stranded, linear
gaattcggccttcatggcctaggggcggtgaaacgtcctgaagagcgtccagctcgtggccgagaggactcgggcgctccccacgctggaggccgtggaccgctccctttaaaagttgaaacggccgccgttcgggacggcctggcgggaggagggcccgacgaggggaggcttcagggacaactggggcttctcgacgtccacccttttcagggcgcggccccggtagccctcgggccggcccaggtacaggaggtgcttcccgggacccccggagtacctggagggacctcccgaggggactcgag

SEQ ID NO: 153 - DNA (cDNA), 438 bp; double-stranded, linear
gaattcggccttcatggcctacaatcccaaatgtaggatcatgcccattgccctaagcccaggcatgagagtcgacatctctcctcttatatacagatccagtccacaggtgaagtgggaactctccaaccaggattcagcacaccattgatgttgcgactcctctactggaacacagcttggagaagggattggggctctcatggcaggatgcaatccactgttgagattgtgactcatgcacttgaacctaagtctcaggagttgttgactcttacacccagcacccaggtgataggactctcatgtctggttcctgcccacaggtgaaattgtgacatatacatggtcacagctcacaggtgaggtgataactcacatacctggatccagctaagagaacagattttgactctgatatcttaggccatgaaggcc

SEQ ID NO: 154 - DNA (cDNA), 297 bp; double-stranded, linear
gaattcggcttcatggcctacaagatgactaaagtcttcactcaccaaggaaaagtggctctgtatggcaagctggtgcagtcagctcagaatgagagggagaaacttcaaataaagatagatgagatggataaaatacttaagaagatcgataactgcctcactgagatggaaacagaaactaagaatttggaggatgaagagaaaaacaatcctgtggaagaatgggattctgaaatgagagctgcagaaaaagaattggaacagctgaaaactgaagaggaggatgctctcgag

SEQ ID NO: 155 - DNA (cDNA), 395 bp; double-stranded, linear
gaattcggccttcatggcctaaatttaggaaggtcaaacgtgaatctccatttgacaaacgtccaactgcagcagagattaaagtggaacccaccactgagtcattggacaaagagggcaaaggtgaaattagaagcctagtggagccactcagtatgatccaatttgatgatactgctgagccacagaaaggaaaaataaaaggaaagaaacaccatatctcttcaggaactatcacaagcaaagaagaaaaaactgaagagaaggaagagttgaccanacaagtcaagtctcatcaacttgttaaatcactctcaagagtggctaaagagacttcagaatctaccagagttctagaaagtccagatggcaaaagtgaacagcgtaacctcgag

SEQ ID NO: 156 - DNA (cDNA), 422 bp; double-stranded, linear
gaattcggccttcatggcctacagagtactgagtggaacatacgatgatagatttacaaataatgtagcatacttctacttcattgtatcttaagtttcttgaaatattgctactggagattggaaagaaatcttaatgttatggggtattgtctaagaagctttattttaaaaccatctcattaaattttgttgcattttagataatcgtccccagatgccatgttaccctagtgcagagtttggggctggataagtttttgttgtaggtggctatcctgtgttttgtagggtatttagcagcatcctggccttaaaacaaaaatgttttcagacattgccaaatgtcccccgagcggtaaagtcacccccaagttgagaaccgctctatacaaagagctgttattagagccagactcgag

SEQ ID NO: 157 - DNA (cDNA), 492 bp; double-stranded, linear
gaattcggccttcatggcctagattgcttgaggccagaagttcaagacaggctgcccaacatagtgagacccccttctctaccaaaattttaaaaatgagcatgcatctgtagtcctagctattgggaaggctgaggcaggaggatcatctgagcccaggagtttgaggctgcagtgagctaagaaggtgccactgcactgctgttgtctctcagcagatcattttcagctttctttggagagtagccattagcaatgcaaatgtgaagtttgatagcacaataaataaaacactgaaaactgtagatgttacttataaaacactggcactcagataaattgggtttggtcaagaagacagtgaagcatatccctgttgggccagaggctgttatcgttttgctctgaattcaaaacctgatatgtctccaaatttgcttagggttgttatcctggaaaatagaatctgatagaaggtgggcacatctcgag

SEQ ID NO: 158 - DNA (cDNA), 505 bp; double-stranded, linear
gaattcggccttcatggcctactgctttcgtgaagacaagatgaagttcacaattgtctttgctggacttcttggagtctttctagctcctgccctagctaactataatatcaacgtcaatgatgacaacaacaatgctggaagtgggcagcagtcagtgagtgtcaacaatgaacacaatgtggccaatgttgacaataacaacggatgggactcctggaattccatctgggattatggaaatggctttgctgcaaccagactctttcaaaagaagacatgcattgtgcacaaaatgaacaaggaagtcatgccctccattcaatcccttgatgcactggtcaaggaaaagaagcttcagggtaagggaccaggaggaccacctcccaagggcctgatgtactcagtcaacccaaacaaagtcgatgacctgagcaagttcggaaaaaacattgcaaacatgtgtcgtgggattccaacatacatggctcaggagatgctcgag

SEQ ID NO: 159 - DNA (cDNA), 373 bp; double-stranded, linear
gaattcggccaaagaggcctagccggagcagctgtctgggagtcaaggctgcagtagcgtttcttcatggggtgctccagggggtgccacagaccgacaggcagcccaagggcctggacacccctccccaggcaggtgctgccccaggaggactgtcctcgggaatgaacctcccgcgggctttggactgaggtccctgtggcctcggtctcctccccatgaagtgggagcgaggctccccaatggtgcttttggctttagtgtacgatgtttgctgtgcttcccgccgtggagggcagagccaccccacatcaggatcggacgtgctacccctcccggtcccggccctggcccagccagcccagccctcgag

SEQ ID NO: 160 - DNA (cDNA), 362 bp; double-stranded, linear
gaattcggcaaagaggcctaatgaattctctgatcacaaaacagacccaggaaagcattcagcattttgagcgacaggcagggctgagagatgctggctacacaccccacaagggcctcaccaccgaggagaccaagtaccttcgagtggccgaagcactccacaaactaaagttacagagtggagaggtaacaaaagaagagaggcagcctgcatcagcccagtccaccccaagcaccactccgcactcttcacctaagcagaggcccaggggctggttcacttctggttcttccacagccttacctggcccaaatcctagcaccatggactctggaagtggggataaggacgggctcgag

SEQ ID NO: 161 - DNA (cDNA), 419 bp; double-stranded, linear
gaattcggccaaagaggcctagttttacaaaacgcgatttgtaatataaactagttagataactcagagggttttattggccatatttttgtttatgctttgtcacaggctttagtcattgcttccatgtgttttcatccttcaggatatcttcaagaagcctacttatggaccaaacaagttctgaccatcatggagaaatctctggtcttgctcagggaggtgacggatggctccctctatgaaggagttgcgtatggcagctacaccactagatcactcttccaatacatgtttctcgtccagaggcacttcaacatcaaccactttggccatccgtggcttaaacaacactttgcatttatgtatagaaccatcctgccaggtatagtgaggagtcagaagtgtgaaaactcgag

SEQ ID NO: 162 - DNA (cDNA), 261 bp; double-stranded, linear
gaattcggccaaagaggcctacaggtagtatctttatagcggtataaaaacagactaatacaaacaggtagctctaaattgtgagtttttcttaactcctttgatcttctgtgatagcgatttttcacatttcacacttccctaatgccaaaaatccacctccagcagctgttttgcctctttcttatcctgccccttggaagaatgtcatcattattgctgccacagcactgtgttctttttcagaagttacagctcgag

SEQ ID NO: 163 - DNA (cDNA), 108 bp; double-stranded, linear
gaattcggccaaagaggcctagtggtctggggcaaaatttagtaagacctggaaagcataggtaatcaaagcagaaactgacaaatgagatggtatcaagctaaaaag

SEQ ID NO: 164 - DNA (cDNA), 292 bp; double-stranded, linear
gaattcggccaaagaggcctagtttaacctcatcagacattattgcagccagctgtcagccaagctcagtaaccttccaacgctcatttccatgaggctagagttcctgagaatcctctgtagccatgagcattacctcaatctgaaccttttttttatgaatgctgatactgctccaacatctccttgtccttccatatcttcccagaactcaagctcctgctccagcttccaggaccagaagatcgccagcatgttcgatctgacttccgagtaccgccagcccctcgag

SEQ ID NO: 165 - DNA (cDNA), 135 bp; double-stranded, linear
gaattcggccaaagaggcctagcaaaaactgttcaaaagagttgttgattactttcatttccactttctcacccccattctcccctcaattaactctccttcatccccatgatgccattatgtggattcctcgag

SEQ ID NO: 166 - DNA (cDNA), 449 bp; double-stranded, linear
gaattcggccaaagaggcctagaaaaagtagcacagtggagtctgaaatagcaagcgaagagaaaagcagagctgctgagaggaaaaggattattattaagatggagccagaagatattcctacagatgaactgaaagactttaacattattaaagttactgataaagactgtaatgaatccactgacaatgatgaattagaagatgaacctgaagagccattttatagatactatgttgaagaagatgtcagcataaaaaaaagtggtaggaaaactctaaaacctcgaatgtcagtaagtgctgatgaaagaggtggtttagagaatatgaggccccctaacaacagcagtccagtacaagaggatgctgaaaatgcatcttgtgagctgtgtggacttacaataaccgaggaggacctgtcatctcattacttagccaaactcgag

SEQ ID NO: 167 - DNA (cDNA), 565 bp; double-stranded, linear
gaattcggccaaagaggcctaaaaggaaacttggacaagtagaaagtggatgacccaggctccgttacatatacttggattccagctgggacctagatttgctgaggacggaagccaaggagacaggaacatgtggctgctcccagctctactccttctctgcctctcaggctgtttgtctctgaacggccccggctctgtgactggcactgcgggggactctctgacagtgtggtgtcagtatgagagcatgtacaagggatataacaagtactggtgccgaggacagtacgacacgtcatgtgagagcattgtggagaccaagggagaagagaaggtggagaggaatggccgcgtgtccatcagagaccacccggaggctctcgccttcactgtgaccatgcagaacctcaatgaagatgatgctggatcttactggtgcaaaattcagacagtgtgggtcctggattcatggtcacgcgatccctcggacctggttagggtgtatgtttccccagcaattacaaccccaaggaggaccacacatccagccaccccgctcgag

SEQ ID NO: 168 - DNA (cDNA), 158 bp; double-stranded, linear
gaattcggccaaagaggcctagtttcctttatatgtttgcacttaatttgattccatccttcatgctgttttcattattcttagttcatctacaccacataaattatcacctttgttttcagttccccaatttccatgtgccacaaacaaatctcgag

SEQ ID NO: 169 - DNA (cDNA), 383 bp; double-stranded, linear
gaattcggccaaagaggcctagtctcaccatctattctaaaccttatattatcaatcctattccctctcaccaaaagaatccctttatacaagtaattatcctgtctatgtctttcaactctagtttccccactgcaactcttcccttaatatatgtacctgctctgttatccctctccagctacttccctattttctgttcccctttacaggaaaacttttctccagcatttcccaatgccattgtcttacttcctcacattctattttcttctcaaaccatttttattaggcttctttccccaatggctattgtcaagcttcacttaatgccgtgcaaatcaccctattctccaggtcttctttcttcccagtctctcgag

SEQ ID NO: 170 - DNA (cDNA), 282 bp; double-stranded, linear
gaattcggccaaagaggcctaaatattgtctgaaaaaaatatatgagacccattactcagtctctcctcctgccatttatactgcaggtattccccaagtttctcttctcaacctttgcctccttttccctgcttgctcccttagttttctcctctgggtggatgactcccaaatctagcactgacctgtttgtccacatccttgagtatcccaccaccatttcacacccagcatatccagatggagctcttatcagttgtaacagcactgctcaattcgag

SEQ ID NO: 171 - DNA (cDNA), 350 bp; double-stranded, linear
gaattcggccaaagaggcctagtggaagagaagaatgtttctgtctcttcctacgttgactgttcttattccactggtttctttagcaggactgttctactcagcctctgtggaagaaaacttcccacagggctgcactagcacagccagcctttgcttttacagcctgctcttgcctattaccataccagtgtatgtattcttccacctttggacttggatgggtattaaactcttcaggcataattgatgcaactagagtcaatatgctgtatatattaatgatagctcttgggcatcgatctctgaaagctcaaatggatggaatttagtttgcgggaactctcgag

SEQ ID NO: 172 - DNA (cDNA), 140 bp; double-stranded, linear
gaattcggccaaagaggcctaggggtgtacattttattggaaaccttaaatactgttcagaaagaatatatcttcaatcaaggctcttgtgcagcctacacagaaaaatgaagctttttgggttaggtgcaacgctcgag

SEQ ID NO: 173 - DNA (cDNA), 304 bp; double-stranded, linear
gtggtctctcctcccctgccactcccctcttcttttttttccaacatggccttgctccgcgtacatcgccacccagggaccgctgcccgccaccgtggctgacttttggcagatggtgtgggagagcggctgcgtggtgatcgtcatgctgacacccctcgcggagaacggcgtccggcagtgctaccactactggccggatgaaggctccaatctctaccacatctatgaggtgaacctggtctccgagcacatctggtgtgaggacttcctggtgaggagcttctatctgaagaacctcgag

SEQ ID NO: 174 - DNA (cDNA), 188 bp; double-stranded, linear
gcgattgaattctagacctgcctctcttatacctcggtgtggccgaaaggaaataagcagaggcgctattggcaggacctagaaactttccttgtaacatagctagtatgttccctctgccccttcttcatcttttcctcacacttgctggagctggagcagctatcctgaccgcaggtgcactcgag

SEQ ID NO: 175 - DNA (cDNA), 274 bp; double-stranded, linear
gaattcggccttcatggcctactatctgccttgcgctcccactgccctgacctgtgccctctcacaggcccccgtgatggctcgctggcctcccttcggcctctgcctcctcctgctgctgctgtccccaccgccactgcccttgacaggggcccatcgcttctccgcacctaataccactctcaaccacttggcactggcacctggccgaggcacactctatgtcggcgcagtgaaccgcctcttccagctcagccccgagctgcagctcgag

SEQ ID NO: 176 - DNA (cDNA), 327 bp; double-stranded, linear
ggtcagccgagcatgataggagacatcatcaacctcggcctgaaagggagggaggggagagcaaaggtcgtcaacgtggagatcgtggaggagcccgtgagttatgtcagcggggagaagccggaggagttttccgtcccattcaaagtggaggaggtcgaagatgtgtcgccaggcccctgggggttggttaaggaggaggaaggttatggagaaagcgatgtcacattctcagttaatcagcatcgaaggaccaagcagcctcaggagaacacgactcacgtggaagaagtgacagaggcaggtgattcagtgggcgagctcgag

SEQ ID NO: 177 - DNA (cDNA), 408 bp; double-stranded, linear
gaattcggccaaagaggcctaagcaatgtctccaccactgctgctgctacccttgctgctgctgctgcctctgctgaatgtggagcctgctggggccacactgatccggatccctcttcgtcaagtccaccctggacgcaggaccctgaactactgaggggatggggaaaaccagcagagctccccaagttgggggccccatcccctggggacaagcctgcctcggtacctctctccaaattcctggatgcccagtattttggggaaattgggctgggaacgcctccacaaaacttcactgttgcctttgacactggctcctccaatctctgggtcccgtccaggagatgccacttcttcagtgtgccctgctggttccaccaccgcttcaatcccaatgtcctcgag

SEQ ID NO: 178 - DNA (cDNA), 305 bp; double-stranded, linear
gaattcggccaaagaggcctaggaggaatttccatcttgctctcaaagtgagtctgaatgtgctcggtggtgtcacccccgccgagctgccagtgcagaaggccactattgaactcctgcacacgccccaacttgtcagatcggtcaacaacaaacaggttgttctttttgactatctttattggcagcttgtcgaacttactggcttgcttgggcttctcctttgggtctgcagcggcgtccggggcagtcagagcgatgctgctcttttcatcgctttctgtcttctcgctgtctacctcgag

SEQ ID NO: 179 - DNA (cDNA), 247 bp; double-stranded, linear
gaattcggccaaagaggcctagtgcagcaatttagagagtgtctcaggagtgtggctcactggcagctgcagctatgttagtgcttctttctgcctcaagttcagaaacaagctggactatctcagggtgattgaattttcctgctgtggaatcatagaagtcttgcagtctcccaggtttgtgttcaaggtcttcatattcagatgcttgaagaatcatttcacattggtctagcattcaatcgag

SEQ ID NO: 180 - DNA (cDNA), 315 bp; double-stranded, linear
gaattcggccaaagaggcctagtcaagttcatttcccagagtcttaagactaagttctgcctcctcattgcaggtgtgccgagagttttttttgaacaacaaaaattactaaggaacctcactacctttggcggtagaattagaaaacagattcagcagtcacctactccccttcagtaattcgagacaattatttttctcctgacacaacatcaggtcccatgaaaaatgacaccgtgcctggtgtttttgggttctttaatgcttcttttagagccacatttttcttttcaaaccgagttcccatcgctcgag

SEQ ID NO: 181 - DNA (cDNA), 328 bp; double-stranded, linear
gaattcggccaaagaggcctaatttttcttcacgttctttatcaccaccatggttatgttggctgccctggctcaccatttgttttactgggatgtttggtttatatataatgtgtgtttagctaaggtaaaaggctacaggtctctttccacatcccaaactttctatgatgcttacatttcttatgacaccaaagatgcctctgttactgactgggtgataaatgagctgcgctaccaccttgaagagagccgagacaaaaacgttctcctttgtctagaggagagggattgggacccgggattggccatcatcgacaacctcgag

SEQ ID NO: 182 - DNA (cDNA), 123 bp; double-stranded, linear
gaattcggccaaagaggcctagttgtggaaaagaaagactgtgagggtaggcacaagagcactcaaatgtcccaggtagagaaaacaacatgtatgatggcccagaaggaggcaagtctcgag

SEQ ID NO: 183 - DNA (cDNA), 311 bp; double-stranded, linear
gaattcggccaaagaggcctacttggacaagtagaaagtggatgacccaggctccgttacatatacttggattccagctgggacctagatttgctgaggacggaagccaaggacacaggaacatgtggctgctcccagctctactccttctctgcctctcaggctgtttgtctctgaagggccccggctctgtgactggcactgcgggggactctctgacagtgtggtgtcagtatgagagcatgtacaagggatataacaagtactggtgccgaggacagtacgacacgtcatgtgagagctcactcgag

SEQ ID NO: 184 - DNA (cDNA), 130 bp; double-stranded, linear
gaattcggccaaagaggcctagttcaatctgtaacaagccttcttcaatttcctctccacataccctgcatagactttaagattcctctgctcgatgctaataagaagacacacacccctcgttctcgag

SEQ ID NO: 185 - DNA (cDNA), 416 bp; double-stranded, linear
gaattcggccaaagaggcctaggagggggaagagagtccgttttgcagaagatgaagaaaagagtgaaaattcctcggaggacggtgacataacggataagagtctttgtggaagtggtgaaaagtacatcccacctcatgtgaggcaagctgaggagacagtggacttcaagaaaaaggaagaactagaaaggctgaagaaacatgtaaaaggtctacttaacaggttgagtgaacccaacatggcttccatcagtgggcagctggaggaactgtacatggcccacagcagaaaggacatgaatgacaccctgacctccgctctcatgggtgcctgcgtcactgcctcggccatgcccagcagactgatgatggagcatgttctcttagtcagcatccttcaccacttactcgag

SEQ ID NO: 186 - DNA (cDNA), 344 bp; double-stranded, linear
gaattcggccaaagaggcctactacatttttacctaaatttatagaaaatcaattcggattgacatccagcttcgcagctactcttggaggggctgttttaattcctggagctgctctcggtcaaattttaggtggcttccttgtttcaaaattcagaatgacatgtaaaaacacaatgaagtttgcactgttcacatctggagttgcacttacgctgagttttgtatttatgtatgccaaatgtgaaaatgagccatttgctggtgtatctgaatcatataatgggactggagaattgggaaacttgatagccccttgtaatgccaattgtaacgtactcgag

SEQ ID NO: 187 - DNA (cDNA), 488 bp; double-stranded, linear
gaattcggcaagagcctaaaatctacaagcaccaggaagtcaagatgcaagcaccagccttcagggacaagaaacagggggtctcagccaagaatcaaggtgcccatgacccagactatgagaatatcaccttggccttcaaaaatcaggaccatgcaaagggtggtcattcacgacccacgagccaagtcccagcccagtgcaggccgccctcagactccacccaggtcccctgctggttgtacagagccatcctgagcctgtacatcctcctggccctggcctttgtcctctgcatcatcctgtcagccttcatcatggtgaagaatgctgagatgtccaaggagctgctgggctttaaaagggagctttggaatgtctcaaactccgtacaagcatgcgaagagagacagaagagaggctgggattccgttcagcagagcatcaccatggtcaggagcaagattgatagattagagcgactcgag

SEQ ID NO: 188 - DNA (cDNA), 163 bp; double-stranded, linear
gaattcggccaaagaggcctaggtcagatgcattaaaacatatcaaaatgttacaaaaatgtatggctcccttgctgaggccctgtcagattatgttagatgagtaaacgcatcagtgtgtaagttcagaaccaaacgttgaatcaagtcatgtactctcgag

SEQ ID NO: 189 - DNA (cDNA), 310 bp; double-stranded, linear
gaattcggccaaagaggcctacctgctcatacctgtggccaaaagcatgatgccccaggctctgcctccaattctaccatcttcttccatctttctcttttatcaggtctctgccctcctgtactttgtacttagattctcctctgccaagcccattcagactgtgactggtaggagtgctgtgctcagctttccacttgagtgtttatccaagaagttggataaccctctcaagttatggcctccattccagtgcgcctcagtctatggggatgcattccactcacccttgggcctagggcaggtcgag

SEQ ID NO: 190 - DNA (cDNA), 516 bp; double-stranded, linear
gaattcggccttcatggcctagggcctcagtctttttacttttgcggctgtgtttctctgaaggcttggcattagtagattgaaaagaataaccatctagggaaatgtgaattcagtttctttctgacattctgctctctacaaggggatattatgtacacataaacctacttccaaaataatgaagtgaggcctaattccttactcttcagagagcccactgtggaagtgtcactgaccttgtgtatgggctgcccttcatggctctgggagtcattataaagggcagcatttggcgtggtgcgtcctaagccagtgtttctcggctctgttccttaaacatgtgttagtgttaatagatgttcttggaaaaaaaaaaaaaaaaacagcattctgaggtcaaacatgctcagaaagcttggaatctgcactacgcttctcgtacacatttcatattaaagattttggaaagtcctgcaatacagagccctgtctaatattgccacagccctcgag

SEQ ID NO: 191 - DNA (cDNA), 319 bp; double-stranded, linear
gaattcggccttcatggcctacttgctagatagacagattaagaatgttgaagacatggtccagtttattaataacattttggatggcacagtagaagcccaaggaggtgatagcattttgcagagattgaaaagaatagtatttgatgccaaatctactattgtgtctatattcaagagctcaccactgatgggctgctttctctttggcctgccactgggtgtcatcagtatcatgtgctatggaatctacacagccgacacagatggaggttatatagaagaacgatatgaagtgtctaaaagtgaaaatctcgag

SEQ ID NO: 192 - DNA (cDNA), 382 bp; double-stranded, linear
gaattcggccttcatggcctaagcagaaggacatattagagaaggattgtatagttttctggtaaaagatgacagtgaattgtatgggcgatggattagccgtggaaggtgttgagtataagtggtctccagccaaactctatggttactggaataagagagtaggaaccttctcaggctttatctttatctattcttgtcaacagtatgtacatgtgtcccccagccccaaataactgtacagtttaatgatgttcactctatacagttcccagaatccattggaaattgctgtaacagcatatcctcaatgcccatcaattctccacgtccaacttctccatggcctcctctgcctctgctgatctgtgaacttctcgag

SEQ ID NO: 193 - DNA (cDNA), 474 bp; double-stranded, linear
gaattcggccttcatggcctaatatttttaaagcgaaagctaacttctaattttgaaaatttttattgggagcaggatattataataataatctttagttgttaaaccattaaacatcaaggttttttacattgtttctatgcctcctccctcaaaaaaaaaaaacctcctacaataaaactgaaaaattgcacaaagacatattagtggaagaccactgcttcgtttacacaaatgaagagtataaagcagagaagtgctccttggggcaaaaggcaattggcaaaaagctaaggaacattttcataatgaattagaaatacagatcatcaggaatatccaggaagcgatagtgaataccaggcaggcttaagagacaggaaacatttagcatgttggtaaaccactttagcacatcagcaaaagcatataaacagctttaggattggaaattattgccaggggggactcgag

SEQ ID NO: 194 - DNA (cDNA), 499 bp; double-stranded, linear
gaattcggccttcatggcctacgtnnctatgtcttcaagcacagaggtgtccaggtgtattgcacatcttcatcgcactgagctgcatggacagctgatttctgtggaaaaagtataaggtgatccctctcagaaagaaatgaagaaagaaaatgatgaaaagagtagttcaagaagttctggagataaaaaaaatacgagtgatagaagtagcaagacacaagcctctgtcaaaaaagaagagaaaagatcgtctgagaaatctgaaaaaaaagaaagcaaggatactaagaaaatagaaggtaaagatgagaagaatgataatggagcaagtggccaaacatcagaatcgattaaaaaaagtgaagaaaagaagcgaataagttccaagagtccaggacatatggtaatactagaccaaactaaaggagatcattgtagaccatcaagaagaggaagatatgagaaaattcatggaagaagtaagcaaatgctcgag

SEQ ID NO: 195 - DNA (cDNA), 337 bp; double-stranded, linear
gaattcggccttcatggcctaagcaaaagagcattaagaagtgtctgtttttgttattgccatttcataaatattttagtaggtgttcaatttcattggatattctttttttttaattgtctttgtacctatgattgaaaacagtagttggtctatgacttttgaggagagggagaaccgaagattacaggaggccagcatgaggttggaacaagagaatgatgaccttgcccatgaactagtaacaagcaaaattgctctacggaatgacttggatcaggcagaagacaaggcagatgtgttgaataaagagctccttttgaccaaaaccctcgag

SEQ ID NO: 196 - DNA (cDNA), 386 bp; double-stranded, linear
gaattcggcttcatggcctaaaggaaactgacaaattatccccagctgccagaagaagaaatcctcactggacggcttcctgtttcctgtggttcattatctgattggctgcagggatgaaagtttttaagttcataggactgatgatcctcctcacctctgcgttttcagccggttcaggacaaagtccaatgactgtgctgtgctccatagactggttcatggtcacagtgcaccccttcatgctaaacaacgatgtgtgtgtacactttcatgaactacacttgggcctgggttgccccccaaaccatgttcagccacacgcctaccagttcacctaccgtgttactgaatgtggcatcagggccaaagctgtcatcctcgag

SEQ ID NO: 197 - DNA (cDNA), 429 bp; double-stranded, linear
gaattcggccttcatggcctagtttttgtctttttttcttttttggtattattttgtttgccacttattcctaaaattcatattgctattaaccgtacacatctttccatgttcttataataatctacaaacatctctccctttctgtagctctctctgtcacacacacacacatgcacacacgcacacacacacacacacacacgctgtgcactctcctgaagcatgtgtgtacatacatacatatgtgaggggttttatgactgttttaccaaattgtgttcttaatatatacaatgttggcttctttttagccattcagaagttatttcagtcatggaatgatctctagccatataactgaaaacaggtaagtttctttcttggggaagaagggcgaatggtgatagagaaaatggagagctcgag

SEQ ID NO: 198 - DNA (cDNA), 349 bp; double-stranded, linear
gaattcggccttcatggcctaccaagctatgcaggaacagttgtctaagaacaaagaactgacacagaaactccaggtagcctctgagagtgaggaagaggagggaggcacagaagatgtggaagaactccttgtccctgatgtagtgaatgaagtgcagatgaatgcagatgggccgaatccctggatgctcaggagctgcaccagtgacaccaaagaggctgcaacccaggaggaccctgagcaactgccagagcttgaggcccatggagtttctgaaagtgagggagaagaaagaccagtggcagaagaagaaattttgttgagagaatttgaagaaaggctcgag

SEQ ID NO: 199 - DNA (cDNA), 312 bp; double-stranded, linear
gaattcggccttcatggcctagggaaagctccaacttgctttacctttctaagatatcccattttctctataccatttgttgactaatatatctcttgcccactggtttgtaacagtgccttaattagtttttgtgtttgaagttccagaatctcttcctggcctatgtattgtgttccgttgatggatctttccatcccatggtaccctttactattattgtcttcatttttattactattgttatgcccttttctctctccgtgcacatcttcatgtttgaactctaaaaacacaccgccaacgctcgag

SEQ ID NO: 200 - DNA (cDNA), 385 bp; double-stranded, linear
gaattcggccttcatggcctaatatatccaagtaatagcatgtacagtttggtaagcaatataatagagagatattcacagtgaaataggaaagagcagtataggtgcaaagacaaaaagcatgacacagctagatacagggcagctgttattggttttgtatggagaaaacctggagaaatggtgagagaaggggcagaagatgagaggggccagatcatggagtacctgtttgtggcgctcaggagtttagatgttatcatgcagataactaggagccatttgaggaacttaaatacaggagtgataccagatttatatgtttttaaaatgattacttggtggtaattaaagaaaagattggatgatttaggcagatctcgag

SEQ ID NO: 201 - DNA (cDNA), 204 bp; double-stranded, linear
aattcggccttcatggcctacgtttttttaaatttttttaactacatatttgatacgatcttttccttcttgccttctttttgattacttactttctaccattctatgtttttcgtcactagtttgaaaattgtatactttgtttttattctttcagtggttaccctagaaattacaacaaacaaaaattgcaacaacctcgag

SEQ ID NO: 202 - DNA (cDNA), 450 bp; double-stranded, linear
gaattcggccttcatggcctaaaatcatcatgcatatttatttctccaaagcacctttgacaagcatgatttggatagagactgtgctttgtcacctgatgagcttaaagatttatttaaagttttcccttacataccttgggggccagatgtgaataacacagtttgtaccaatgaaagaggctggataacctaccagggattcctttcccagtggacgctcacgacttatttagatgtacagcggtgcctggaatatttgggctatctaggctattcaatattgactgagcaagagtctcaagcttcagctgttacagtgacaagagataaaaagatagacctgcagaaaaaacaaactcaaagaaatgtgttcagatgtaatgtaattggagtgaaaaactgtgggaaaagtggagttcttcaggctcttcttggagaagactcgag

SEQ ID NO: 203 - DNA (cDNA), 558 bp; double-stranded, linear
gaattcggccttcatggcctaactggtttctggctcgtggantctgtttcaagatcatataagccgttgccattcccaagnagcgctgggatatgctccttctcagatgctgctatttcagtgaaggtatttaatgcttgttcaacattagatttctgtttggtagccattaagcaatagttttccattatgcgaanctgtacgtgaccctgaacagtctgaggttttagttccttaanaagtttttctgctgttcttactgccagttgcacagattcttgcttctcagttgaataacccaggtctccatccaggttttcaaatacttcacctccaacagtttcattatctggattcaaacagatctctatcatattataaagggcattttggccccagtcacgatctttccgagctttattaaaatgtcgaagggcatcatttggttctccagtgtaccaaagatacagtcctttacaatactgaaatcctggttccaattttgctctggagnnacgtttctcagccattgagaaaaatcttgggacatccctcgag

SEQ ID NO: 204 - DNA (cDNA), 348 bp; double-stranded, linear
gaattcggccttcatggcctacaagtagggactgacttctctaggttcctacaaagctcttcaaccacactcatttcaagctctgtcagaacagcatctgaattaggaggactttgggattctgggatacaggaagtatccagagctttggatataaaaaaccctgggacagatattttgcagcctgaagagacctatatagaccctactatgatacaatctttaacttttcctttggcccttcataatcaaagctccgataagacagctaacattgtggaaaacccatgtcctgagattctaggagtggatgtaatatctaaagagacaactaggaggaagctcgag

SEQ ID NO: 205 - DNA (cDNA), 292 bp; double-stranded, linear
gaattcggccttcatggcctaagaaaaaaaagaaagaaaaaaaatgatactttccaggttcgcttgggtccagatctgtattcccagggctcatagagatattggcaaactgacagatttcatggctcaagaaacctaaagacacctacttgaattcctttggttggcagtcaaatgttaactagtgtgttttcaagcttctattcttaggcatgttacttccttttggaagtcaaaaccaaccatcttttaagtaagagggctaaccaaatatgtgccacactaactcgag

SEQ ID NO: 206 - DNA (cDNA), 220 bp; double-stranded, linear
gaattcggccttcatggcctaaaatattaaaatctttgaagaagaagaagttgaatttatcagtgtgcctgtcccagagtttgcagatagtgatcctgccaacattgttcatgactttaacaagaaacttacagcctatttagatcttaacctggataagtgctatgtgatccctctgaacacttccattgttatgccacccatctcgaggcaggtctag

SEQ ID NO: 207 - DNA (cDNA), 333 bp; double-stranded, linear
gaaaaaatggccaaggctactgggaaactaaagccaacttctaaagatcaggtattggccatgctagagaaagccaaagttaacatgccagccaagcctgctccacccactaaagcaacttctaaaccaatgggagggtccgctccagccaaattccagcctgcatcagcacctgctgaagattgtatttccagcagtacagaacccaaacctgatccaaaaaaggccaaagctccaggattatcctctaaagcaaagagtgcacaagggaagaagatgccaagcaaaaccagcttaaaggaggatgaagacaaatccgggcctatactcgag

SEQ ID NO: 208 - DNA (cDNA), 316 bp; double-stranded, linear
ggagacaagttctcctcagtgaactggcagtaccagtgtgggcttacctgtgagcacaaggccgaccttctccctatcagtgcatccgtccagtttattaaaattcctgcacagttaccccaccccctgacaagattccagatcaattatacagagtatgactgcaacagaaatgaggtgtgttggccgcagcttctatatccatggactcagtattatcaaggggagctgcattctcagtgtgttgctaagggcttactgttgctgttgttcctcacattggccttgttcctcagcaacccccggaccactcgag

SEQ ID NO: 209 - DNA (cDNA), 517 bp; double-stranded, linear
gaattcggccaaagaggcctatgtccctgtccatcttagaggctgaccaagcccagccatgggtggtccaaattgcttaggtggtcccaattgcttggctggcccaagagatgtctggttcttaacaatacaagagcctatagaaattgctaaagggatttcagccacaactgaagctcaccaagaatgagttttctggaactggttaaagtgtcacagtagggagtaaggaaataagaatccccaccaaacataagagaacagaatgataatagtccctactagtccatgacaaggctgccaattaggcatttaaagctatcaaagatgatgctgtgagggacctggcaacttttgtaatagtctgactttaaatgttttattaatggccaagcagcaaatattttaggatttgtaggctatatggtctctgtcccaattactccattctgctactgtagcataaaagcagcgatacatcctaaacccgtcgattgaattctagacctgcctcgag

SEQ ID NO: 210 - DNA (cDNA), 829 bp; double-stranded, linear
gaattcggccaaagaggcctaagaacatgaaacatctgtggttcttccttctcctggtggcagctccccgatgggtcctgtcccaggtgcagctgcaggagtcgggcccaggactggtgaagccttcggagaccctgtccctcacctgcactgtctctggtgattccatcagtcattactactggacctggatccggcagcccccagggcagggactggagtggattggatatttctattcacccgggaactccaactacaatccctccctcaagagtcgagtcaccatgtcagtcgacacgtccacgaaccagttctccctaaaactcanttctgtgaccactgcggacacggccgtctattactgtgcgagagacctatattgccgtgggggaacctgctaccccgcgagacttgaccgctggggccagggaacccgggtcatcgtctcgtcagcctccaccaagggcccatcggtcttccccctggcaccctcctccaagagcacctctggggcacagcggccctgggctgcctggtcaaggactacttccccgaaccggtgacggtgtcgtggaattcaggcgccctgaccagcggcgtgcacaccttcccggctgtcctacagtcctcaggactctactccctcagcagcgtggtgaccgtgccctccagcagcttgggcacccagacctacatctgcaacgtgaatcacaagcccagcaacaccaaggtggacaagaaagttgagcccaaatcttgtgacaaaactcacacatgcccaccgtgcccagcacctgaactcctggggggaccgtcagtcttcctc

SEQ ID NO: 211 - DNA (cDNA), 142 bp; double-stranded, linear
gaattcggccaaagaggcctagttaatctgataaattcaccatcaatttggtaagctttaatataactaccctgttttttgaatacagataatgcaaaagaaaaccattttatactcggctatataccttccaccactcgag

SEQ ID NO: 212 - DNA (cDNA), 555 bp; double-stranded, linear
gaaattcggccaaagaggcctagtggaatcattctgccacaccatttcctactcaaataggtacaaacataccacagacactcccatatacacatgctcctctatccgccaactctggaaccaaaactaaattggtcttcaagagagatgatggctttaagaacaaaaatagccttatcctctattttacttgctgtactgttgtactgtttatttaagaaacaagctggtggttgatgtccaggaaaaattatcttttcaaaatgagggaagaggaggttcaccatgtggatatggtgtgcctttcaacatccttaaggattgttgatatcattattgttaatcaattgttgtcagcacagtggctgcccaagctgtgcaaatgaaacagccaatcagcaggagaaagtgatgaaattaaatgacctctttccttaaccactcatccgtaagccttgttatttttcatacaaacctcgagccgggggaggaggggcggcggcgaatgctgggagagtcaggtctagaattcaatcgtaggcctctttggccgaa

SEQ ID NO: 213 - DNA (cDNA), 97 bp; double-stranded, linear
gaattcggccaaagaggcctacgagaagggcggtgtgtacaaagggcagggacttaatcaacgcaagcttatgacccgcacttactgggaattcctc

SEQ ID NO: 214 - DNA (cDNA), 487 bp; double-stranded, linear
gaattcggccaaagaggcctaagaagaaattggtagattgcgagaagagatagaagaattaaaacgtaatcaggaacttttacaaagccagctgactgaaaaggactctatgattgaaaatatgaaatcttcccaaacatctggcacaaatgaacagtcttcagcaatagtttcagctagagattctgaacaagttgcagaattaaaacaggaactggcaactttaaagtctcagttaaactcacaatctgtggagatcaccaaactacagacagaaaagcaggaactgttacagaaaacagaagcgtttgcaaaatcagttgaggtacaaggagagaccgagactataatagccaccaaaactactgatgtagaaggaagactgtcagcattattacaagagaccaaagagttaaagaatgaaattaaagctctgtctgaggaaagaactgccattaaagagcagctggattcatctaatagtacc

SEQ ID NO: 215 - DNA (cDNA), 584 bp; double-stranded, linear
gaattcggccaaagaggcctactgggcctttcagcacctgctccagcttcaccttggtgaacatcaggttgaagttctcagggtgctcggtgatggccatgttgacaacatccagggcatgctggtggtgcttctgggcagagaagagcagtgccagcaggtggagggcgtgggcatcatccttgcgtaccttcagggcctcctgcagctgctccatggcactggagatctgtcggacgagggccagctgcagcgagacatagaggatgacctgggggtcactgggcgccagctgctgagccctctccagcgtctgcagtgccttccggtgcaattcatcttgcttggacttcagggtggcgtcggtggcctgcaggctataggtgagacccagagccaggtagcccttggggaggaactccccggcttcctctccgaggctgatcaccatcatggcaaagtgctctgcttcctctagccagcgaagggacccgatgcagaccttcgcggccatcaggggcacggtggggtccgagggccgcaacttcacacactcccgcagcagggacacagcgtaggctgac

SEQ ID NO: 216 - DNA (cDNA), 532 bp; double-stranded, linear
gaattcggccaaagaggcctagacctgccctaaagatagagtcttgatgcaccgtctaccttgtccccaaccaagagtgagtagtgcacagaagtctcctggcaccctgggaatcctgcatttttaatggacgagcagggcaggaaagaaaaaaaaaacccaaaccccatcactctgccagcccctgtgaccaaagcagcccaaatcagttaccttgacaactctcatgcacagactgcaccagcctgtgttgcaaacatcactgccccgcttctaacaggaagagatactcttttgggggtcttgcagggcccaggaccagagccccttctacccagggcccttccaaaggcaaagcacagagtcacatttgggcgtggcatgagagggaaataaagagatttggctgtagtgggagggaggtttcagtgctttttctggggacattggtgcctatctctattctgagagttgttctcctcataggacaccataaatcgcatccaggacctgctggctgagggtactcgag

SEQ ID NO: 217 - DNA (cDNA), 269 bp; double-stranded, linear
gaattcggccaaagaggcctagtgtgtccgggtcttatacaaaaacaacacagtgaatgaaggaataaatatttattgaatggaaaatcagcaaaggaaaaaattgtataattgtcaatgacaatgggaagcacatagtgaggctatgagtgatttggaaatcatgagcgtgcagtgttttgttcacgcatttcggttgtgttttcagaaagtaactacaacatagcatcatgtagcagaattgctggttgtaagcaaaaaggctcgag

SEQ ID NO: 218 - DNA (cDNA), 675 bp; double-stranded, linear
gaattcggccaaagaggcctaattctttttctttttaatttgaagaaaaatcatcagtcttggaatacagaagagaaactagaaatatacgtattttgtttcacatttgaacagtcattcttgaggaatactccatacctgagtagacagccatgtggccatcgcagctactaattttcatgatgctcttagctccaataattcatgctttcagccgtgccccaattccaatggctgtggtccgcagagagctatcctgtgagagctatcctatagagcttcgctgtccaggaacagacgtcatcatgatagaaagtgccaactatggcaggactgatgacaaaatttgtgactctgaccctgctcagatggagaatatccgatgttatctgccagatgcctataagattatgtctcaaagatgcaataacagaacccagtgtgcagtggtggcaggtcctgatgtttttccagacccgtgtccaggaacctataaataccttgaagtgcagtatgaatgtgtcccttacatttttctttgtcctggactactaaaaggagtataccagagtgaacatttgtttgagtccgaccaccaatctggggcgtggtgcaaagaccctctgcaggcatctgacaagatttattatatgccctggactccctacagaactg

SEQ ID NO: 219 - DNA (cDNA), 414 bp; double-stranded, linear
gaattcggccaaagaggcctactccctgttttgaacaagtttttttgagaattcttagttttagtttttgtttagcttacacactgaaaattttgagaagcatctaaaaaaatccacaattagtgcaaaaagaggggacaatactttaagtcattccttctataaaaagaattaaggttactaaatgccaatttttaagcaaatatatagtttcctatttgccttctgaaagacagcagatataaaaatagttcaatattaggtttaacaaggtttgaacaacacatgtactatcagctttattttacctgcaaaaatattttagctacacttggaaaaaaataaacttgagaatataacttcacatttctaaggccagatgcaagaatacttatttaggcctctttggccgaa

SEQ ID NO: 220 - DNA (cDNA), 120 bp; double-stranded, linear
gaccgtcgattgaattctagacctgcctcgagattggagacagaaggtcccgggagcagaaagccaaacaggagcgggagaaagaactggcaaaagtcactatcaagaaggaaactcgag

SEQ ID NO: 221 - DNA (cDNA), 333 bp; double-stranded, linear
gaattcggccaaagaggcctaagcagcagctgcttatatgcatgtgaacagctggggaattaatttggtatgcattctcaggagccactcatctgctggcagaggtagcagaagaatgcccttagtgtaagtcctctacaaccatacaccaaatgtgctccctgcatttcaaattccattgtagaaagtctctgataatctcacttataccatgagccattcctcagtatctgtcctcttcctgttagtgttctacaattcctttctccttaatttttctccgctttacaaaatgtcacacagacaagtgcataatacttaaacaagctcgag

SEQ ID NO: 222 - DNA (cDNA), 817 bp; double-stranded, linear
gaattcggccaaagaggcctaagaaaagcacccttattaagaattgcagcaagtaagccaacaaggtcttttcaggatgattttcttatatcaagtggtacatttcattttatttacttcagtttctggtgaatgtgtgactcagttgttgaaggacacctgctttgaaggaggggacattactacggtcttcacaccaagcgccaagtactgccaggtagtctgcacttaccacccaagatgtttactcttcactttcacggcggaatcaccatctgaggatcccacccgatggtttacttgtgtcctgaaagacagtgttacagaaacactgccaagagtgaataggacagcagcgatttctgggtattctttcaagcaatgctcacaccaaataagcgcttgcaacaaagacatttatgtggacctagacatgaagggcataaactataacagctcagttgccaagagtgctcaagaatgccaagaaagatgcacggatgacgtccactgccactttttcacgtacgccacaaggcagtttcccagcctggagcatcgaaatctttgtctccttaaaacatctgagagtggattgcccagtacacgcattaaaaagagcaaagctctttctggtttcagtctacaaagctgcaggcacagcatcccagtgttctgccattcttcattttaccatgacactgatttcttgggagaagaactggatattgttgctgcaaaaagtcacgaggcctgccagaaactgtgcaccaatgccgtccgctgccagttttttacctataccccaacgctcgag

SEQ ID NO: 223 - DNA (cDNA), 587 bp; double-stranded, linear
gaattcggccaaagaggcctaggagatacatcatcatatcacggaaagagatgcagatagatctttgaccatacttgatgaacagttatactcatttgcgttttccaccgtgcacattacgaagaaaagaaatggaggtgggagtttaaataactattcctcctccattccattgactcccagcaccagccaggaggacctttatttcagtgttcctcccactgccaacacacccacgcccgtttgcaagcagtccatgggctggtccaacctgtttacatctgagaaagggagtgacccagacaaagggaggaaagccctggagagtcacgctgacaccatcgggagcggcagagccatccccattaaacagggcatgctcttaaagcgaagtgggaaatggctgaagacgtggaaaaagaaatatgtcaccctgtgttccaatggcgtgctcacctattattcaagcttaggtgattatatgaagaatattcataaaaaagagattgaccttcggacatctaccatcaaagtcccaggaaagtggccatccctagccacatcggcctgcgcacccatctctcgag

SEQ ID NO: 224 - DNA (cDNA), 534 bp; double-stranded, linear
gaattcggccaaagagcctaagtagttgctgcctttcttcagatcaggttaccacaatgcctccccgctgctgacgcttcatcccccacacctccagccccagttacctggagcttctcagaacccactttgccggtgctaaaacacaagagggggtgaaagtggctgccagtaatggccagaaaccaaccaccagaggccaggctgaaagacaagctccgggtgtccaggggctgacgggccaaccatgtggcaggtcccaggccccacccactgcgccatccgtctctgagctccacagtggtcccactaatgggaacctcctctagggagagtgatactgcaccttcacccgtaggactcatatttataacaatgtgtaatggctgtagcaaaaagcccttgtttctagatgtaaatggtcaaagaaacaagcgctctattgttttgaataaaatagttcaaatgagtcctgtatcattgtatctcctattctggattagtgccttttggacagtagactgtaacctcgag

SEQ ID NO: 225 - DNA (cDNA), 118 bp; double-stranded, linear
gctccactctctccctatccatttgtaagaacaggctcccctcgccgaatacagttgtctcaaaatcatcctgtctacatttccccacataaaaatgaaacaatgctttctcctcgag

SEQ ID NO: 226 - DNA (cDNA), 582 bp; double-stranded, linear
gaattcggccaaagaggcctaaattttagtagagatggaatttcaccatattggccaggccggtctcaaactcttgacctcaagtgatctgcccgcctcggcctcccaaaatgttgagattacaggcgtgagccaccatgcctctcttacattcttttcttctgttcactacagccgtggagagctccgggttgtcctgcacatgtgcactgccctctcttttatggaccttttaggctggctgcaccctccgtctgtgtcaccctcctgctcctcctccacctggctagttcctgttggccacttttggaaattcatgccagtccagtccaccctgagtacatcctctttctgtgtcactgagctcactatgctgggttttatctatgtctccctcgcaactagatcattcacgtcttgaagttaggcatcatgcgttcttcatttctgtacctcccaactcaatgcttagcacccagcaggggctcaagactgtgtgtggaatgaaggattcgtgtgaaaatgcagggagatggaaggctgagcgtttctgttccttgaccattcccgggttggctcgag

SEQ ID NO: 227 - DNA (cDNA), 461 bp; double-stranded, linear
gaattcggccaaagaggcctaaaaacttataaataagtgagactactgccccctagcctaaaattcattccctgcgctcactcaacatcatagttctttaggaagacaagttgttctatagcataaagatacaacctatttagatagtctaaagattctcctctgtttctcaaatacagtcagttatgcagctcaaaatgcctctcattttcctgcttttttttcttctactattgttgcctccaggctttgcagaaacacatgttattctccccctaaaatctgttcctcttctagttttctctctgccagcaatggcaccacacagtcttttggttttgcaccagagaattagagatgaacccctcatctctaatctatcacaagtttcctcagatttaaactctcaaatcaagatgtttctcaccatttccattactattgtccccagctttctcgag

SEQ ID NO: 228 - DNA (cDNA), 133 bp; double-stranded, linear
gcctaaaccgtcgattgaattctagacctatctcgagaaagagttgttctggaaagaaatgaagaaaagagcagaaccaatctcaagcagccaagtggtgaagttggatgtatgtgaccctacgtctctcgag

SEQ ID NO: 229 - DNA (cDNA), 482 bp; double-stranded, linear
gaaagggatcaaaaagaaaaagtgatcgaatggaatctactgataccaaacgacaaaagccttctgtccattcaagacaactggtttctaagccactgagctcatctgttagcaataacaaaagaatagttagtacaaaaggaaagtcagccacagagtataaaaatgaggaatatcaaagatctgaaagaaacaagcgtctagatgctgatcggaaaattcgtctatcaagtagtgcctccagagaaccttataagaatcaacctgaaaaaacctgtgtccggaaaagggatcctgaaaggagggccaaatctcctacgccagatggttctgagagaattgggcttgaagtggatagacgtgcaagcagatccagccagtcttctaaggaagaagtgaactctgaagaatatggctctgaccatgagactggcagcagtggttcttctgatgagcaagggaacaacactgaaaatctcgag

SEQ ID NO: 230 - DNA (cDNA), 501 bp; double-stranded, linear
gaattcggccttcatggcctaggggataaatgtaagcttgttaaagtaagcaccacaccatgtttctgtctccccagcacccagcacagtgctgtgaaccttggcagatgctagataaatgtgtgttgaatgaatgtgcctatgaagccacaaagatgccacatgttagtatatcagtgagaggtgactccacagtgctctctggagaagcaatatgagtgactgaagagtggggccttttgcttttgcctggatataggggtgctcttctactgtaattgggtgtggaaaaactctggctttatggtattccattaggttcttttcatttaaagtagtcttaaaatcaaagtatccaatattttaaagccacaaagtagattacataattagcagagattttagtcagtaaaatgttagaaatcaaactataagaaaattcaagtcctttattttgtgtcttgggtatatgtcattattttaaattccacagctctcgag

SEQ ID NO: 231 - DNA (cDNA), 326 bp; double-stranded, linear
gaattcggcttcgattgaattctaggacttgacagaattcgagttatccttctcagaacatgtgcagagtctctttttgcctcaccatgtggtcctgtgctctttcaggtgggagttttggggcctccagggcagcaggcaccacctccatatcccggcccacatccagctggaccccctgtcatacagcagccaacaacacccatgtttgtagctcccccccaaagacccagcggcttcttcactcagaggcctacctgaaatacattgaaggactcagtgcggagtccaacagcattagcaagtgggatcagagcaatctcgag

SEQ ID NO: 232 - DNA (cDNA), 367 bp; double-stranded, linear
gaattcggccttcatggcctaatcagaagcttttcaaaattccgtcttcaagaagaaacacccgtggaggaagaagacattatacaaaacaaatttagaaactgggatcatgagtggaaaaacaaaggcaagaagggctgccatgttttttagacgttgctctgaagacgccagcggtagcgccagtggcaatgctttgttatcagaggacgaaaatcctgatgcgaatggggtaactcgatcatggaagattattctaagtacaatgcttacactgacttttcttcttgtaggactcctaaatcatcagtggcttaaagaaacagatgttcctcagaaatccagacaattatatgccatgctcgag

SEQ ID NO: 233 - DNA (cDNA), 320 bp; double-stranded, linear
gaattcggccttcatggcctaaagaagaattgacacctcttggagtccacttggcacgattacccgttgagccacatattggaaaaatgattctttttggagcactgttctgctgcttagacccagtactcactattgctgctagtctcagtttcaaagatccatttgtcattccactgggaaaagaaaagattgcagatgcaagaagaaaggaattggcaaaggatactagaagtgatcacttaacagttgtgaatgcgtttgagggctgggaagaggctaggcgacgtggtttcagatacgaaaaggacacactcgag

SEQ ID NO: 234 - DNA (cDNA), 358 bp; double-stranded, linear
gaattcggcttcatggcctacgatgaggctgctgtcatttgtggtgttggctctatttgctgtcactcaagcagaggaaggagccaggcttttggcttccaaatcactgctgaacagatacgccgtggagggacgagacctgaccttgcagtacaacatctacaatgttggctcaagtgctgcattagacgtggaactatctgatgattccttccctccagaagactttggcattgtgtctggaatgctcaatgtcaaatgggaccggattgcccctgctagcaatgtctcccacactgtggtcctgcgccctctcaaggctggttatttcaacttcacctcggcaacaatcctcgag

SEQ ID NO: 235 - DNA (cDNA), 513 bp; double-stranded, linear
gaattcggcttcatggcctagttgtacgtaatgtatttatatgttaatttgttatgtatatagatgtgcaagtcttgtcagaattggcctcagtgtagttaaagggcagaaggggaagatactgactagtcatagaaatacctcattcgcctgtgggaagagaagggaagcctcttcagggtgagtgaatggcaaagcggttgcttctggctcctccttcccctgtggtcttggaagtgtgtggaaggcagggacagagatggaggccgagccaatagactgaagagaccacagcaattggctcctccatctagagattttcttggcagtattccatgggatgttaagcaaaggaaaccaaaggaatcgtttcaaatggactcatggcttagaaatctttattcttagggcagtcagtagtattctaaagctttctgacaagataaaggaagtcaccaaaatttctttttttaaattgtatctaatcctcaacaacaaaccaaaactctcgag

SEQ ID NO: 236 - DNA (cDNA), 412 bp; double-stranded, linear
gaattcggccttcatggcctacttggaaatgtttgatgctactctgaaagatcgagaactgagctttcagtcggctccaggtactaccatgtttctgcattggctagtgggaatggtatatgtcttctactttgcctccttcattctactactgagagaggtacttcgacctggtgtcctgtggtttctaaggaatttgaatgatccagatttcaatccagtacaggaaatgatccatttgccaatatataggcatctccgaagatttattttgtcagtgattgtctttggctccattgtcctcctgatgctttggcttcctatacgtataattaagagtgtgctgcctaattttcttccatacaatgtcatgctctacagtgatgctccagtgagtgaactgtccctcgag

SEQ ID NO: 237 - DNA (cDNA), 337 bp; double-stranded, linear
ttcatggcctagagatatgcttctttgtaccaatatggaaaatctaaaagaaaaaacccacactcagcactatgaatgttataggtaccaaaaactgcagaaaatgggctttacagatgtgggtccaaacaaccagccagttagttttcaagaaatctttgaagccaaaagacaagagttctatgatcaatgtcagagggaagaagaagagttgaaacagagatttatgcagcgagtcaaggagaaagaagcaacatttaaagaagctgaaaaagagctgcaggacaagttcgagcatcttaaaatgattcaacaggaggagataaggaagctcgag

SEQ ID NO: 238 - DNA (cDNA), 750 bp; double-stranded, linear
gaattcgcgcattcggtacaacaagagagataaacgatgaaaccgttacattatacagcttcagcactggcgctcggactggcgttaatggggaatgcacaggcagtgacgaccattccgttctggcattctatggaaggggaactgggtaaagaggtggattctctggcccaacgttttaacgccgaaaacccggattacaaaattgtaccgacctataaaggcaactacgaacagaatttaagcgcggggattgccgcatttcgtaccggcaacgcgccggctattttgcaggtttatgaagttggcaccgccaccatgatggcgtcgaaagccattaaaccggtgtatgacgtgtttaaagaggcagggattcagttcgatgagtcgcagtttgtgccgacggtttcaggttactactccgacagcaaaacgggccacttactctcccagccattcaacagctcgacccccgttctctattacaacaaagacgccttcaagaaagcaggattagacccggaacagccgccgaaaacctggcaggatctggcggactatgccgcgaaactgaaagcctccggcatgaagtgcggctacgccagcggctggcagggctggatccaactggaaaactttagcgcctggaacggtctgccgtttgccagcaaaaacaacggctttgacggcacggacgcggtgctggagttcaataagccggagcaggtgaaacacatcgccatgctcgag

SEQ ID NO: 239 - DNA (cDNA), 490 bp; double-stranded, linear
gaattcggccttcatggcctacttacagaacctattcactgggaaggaagccctcattataatgattttcattcttatgtgtgtttcaggacgactgggtttggattcagaagaggattattatacaccacaaaaggtggatgttcccaaggccttgattattgttgcagttcaatgtggctgtgatgggacatttctgttgacccagtcaggcaaagtgctggcctgtggactcaatgaattcaataagctgggtctgaatcagtgcatgtcgggaattatcaaccatgaagcataccatgaagttccctacacaacgtcctttaccttggccaaacagttgtccttttataagatccgtaccattgccccaggcaagactcacacagctgctattgatgagcgaggccggctgctgacctttggctgcaacaagtgtgggcagctgggcgttgggaactacaagaagcgtctgggaatcaacctcgag

SEQ ID NO: 240 - DNA (cDNA), 425 bp; double-stranded, linear
gaattcggccttcatggcctacttctggactctatagaacccactgcctcctgatgaagtccctactgttcacccttgcagtttttatgctcctggcccaattggtctcaggtaattggtatgtgaaaaagtgtctaaacgacgttggaatttgcaagaagaagtgcaaacctgaagagatgcatgtaaagaatggttgggcaatgtgcggcaaacaaagggactgctgtgttccagctgacagacgtgctaattatcctgttttctgtgtccagacaaagactacaagaatttcaacagtaacagcaacaacagcaacaacaactttgatgatgactactgcttcgatgtcttcgatggctcctacccgtttctcccactggttgaacattccagcctctgtctcctgctctaggatcctcgag

SEQ ID NO: 241 - DNA (cDNA), 461 bp; double-stranded, linear
gaattcggccttcatggcctaaccagaactaatttgctaagtcttttgtttagtcctgcaagactgatgcttaatacacagtctgttctcctgtgtctaggtcaggaactccagtttgcttttctgttttgtgtcctggtagcagctgttgagtaactttcattggaggttgggaaggaagtgaggagaaagtgttcttgtttagtgttttatttcctataataggatgctgcctaacccagttcatctctatgtcctgttcactgaatattccgggtaattgaaagaaaatataatggatgggctccattaaaaccagctcaaaaataaattcttgtcagtaaagatttcttgtcaagatgtcttggattgcacttttgttgaggaaagacagtgtaaatagttaaagaatgttgataaaattgaaacatttggttgtggaattgtgtgtggtactcgag

SEQ ID NO: 242 - DNA (cDNA), 508 bp; double-stranded, linear
gaattcggccttcatggcttatggacaaggaagcattcagagcatggtgtcatctgactccacatcaccagattcttctttaacagaagaatcacgttctgagacagccagtagtttatcccagaagatttgtaatgggggattatctcctggtaacccaggagattctaaggacatgaaggaaattgagcccaattatgaaagtccctctagtaataatcaggataaagattcatcacaggcttccaaaagctcaataaaagttccagagacccacaaagcagtccttgctctccgattagaagagaaagatggcaagattgctgtacaaactgagaaggaagaaagtaaagcctctacagatgttgctgggcaagcagtaaccataaaccttgtccccacagaagagcaagcaaaaccttaccgagttgtgaacctggaacagccattgtgcaagccatatactgtcgtggatgtgtcagcagccatggccagtgagcacctcgag

SEQ ID NO: 243 - DNA (cDNA), 323 bp; double-stranded, linear
gaattcggcttcatggcctaggttttctgtacatggagattaaactgtcttccaaagtgaagagtttattgttctagatcttgagcacaaaggttggtatacgttaataaaaaaaatagcaagggaagaaaatcatttccttcataccaagtaagagagcacttatcatggtaggcactggctttgcaattatgagaccagtagtagaaatagctttagtttcctcaattttcctggagtattcttcagactttctttacactgctcaaggtggggcgagtggcagggcggaccctggcgacctgacgctgcggaggctcgag

SEQ ID NO: 244 - DNA (cDNA), 396 bp; double-stranded, linear
gaattcggccttcatggcctagcttcagtagcaaataaggacatcatctgctataacctacaagcagttggacagatattctacatttcctcatttctctacaccgtcaattacatctggtatttgtacacagagctgaggatgaaacacacccagagtggacagagcacatctccactggtgatagattatacttgtcgagttggtcaaatggcctttgttttctcaagcctgatacctctgctattgatgacacctgtattctgtctgggaaatactagtgaatgtttccaaaacttcagtcagagccacaagtgtatcttgatgcactcaccaccatcagccatggctgaacttccaccttctgccaacacatctgtctgtagcacactcgag

SEQ ID NO: 245 - DNA (cDNA), 370 bp; double-stranded, linear
gaattcggccttcatgcttagcctcagctctttcttctgggttgtttgtattttcttttctgtcccaaacagtttcccccacaaaaagaactttatgtctttctctgtcttccctcagtccttccagtcagcagcctgtgattgggcttttcccctcagaaacgaacaatccagaacccactgtttaaaacaactgtattttgccttgggaagtcccattgccttccctgaaaacattaaacattcctccgatccccagcctgagtctctctgtctctgggccccatcctgctccacagcagggctggtgtgtccagcacagagtgaccctccgatgccctttcccacccgccgccctgcctccctcgag

SEQ ID NO: 246 - DNA (cDNA), 367 bp; double-stranded, linear
gaattcggccttcatgcctagagaacttgaagctttgcggcaggaatttaaaaagaaagacaagacgttgaaagagaattccagaaagttggaggaagaaaatgagaatctccgagcagagctacagtgttgttctacacaactggaatcctctctcaacaaatacaacaccagccagcaagtcatccaagacttgaataaagagatagcccttcagaaggagtccttaatgagcctgcaggcccagctggacaaagctctgcagaaggagaagcactatctccagactaccatcaccaaagaagcctatgatgcattatcccggaagtcagccgcctgccaggatgacctgacacaagccctcgag

SEQ ID NO: 247 - DNA (cDNA), 450 bp; double-stranded, linear
gaattcggccttcatggcctacggcttcatagtaactctttgccatatctctagccagctgcataaaacgttcgccatcagatggagacaaaaggtttaaaatacgcctataaccatccatggccattttatgatcacccatctgttcataaaggcttgatcgctcccacagataacggacattagtaggttcatatttaagagcttttgtatagcaaaaaatagcctgcttaatattgtcttgttccagagacatttctgccagtctaacccattcttctgtgtcactgggatttaaatgcgcagcaatcaactcaaactgcaatgatttttccatgtcaccttggtcctcatatatcatggctagagtagagaatggctcataagccagaggagcttgtcttatgatttccatgcacatcaatatcgcctcttcacgttctcctcgag

SEQ ID NO: 248 - DNA (cDNA), 408 bp; double-stranded, linear
gaattcggccttcatggcctaacgaaactgacgtctacctcatggggctgctgtgtgggtttgggaggcaaaaatctatgaagggttttttgaaatcccataggtgccacatctatgagatgtttgataaatgtgaatatgcttttacatttgggcttatctaatttgcaataagagagcctctctctatcaacaccagcttctctctcgggctgtttgctcagggaaggcaagaaagccacgtgctggccctctgccttctctaaagtgctgttggagcatggaggagctggaggagatggggatggactgacagctaagagggcggctgctgggactagatagtggatgaagaaagaaggacgaggaagccgtggggcagcctcttcacatggggacgaactcgag

SEQ ID NO: 249 - DNA (cDNA), 562 bp; double-stranded, linear
gcccatgacagagagcagtgccaaagacatggcgtacgaacatctgatagatgacttattggctgctcagaaggaaattctgtctcagcaggaagtcatcatgaagttaaggaaagaccttaccgaagcccacagcagaatgtcggatttgagaggggagctaaacgagaagcagaagatggaactggagcagaacgtggtgctggtccagcagcagagcaaggagctgagtgtgctcaaggagaagatggcccagatgagcagcctggtagaaaagaaagatcgggagctgaaggcccttgaggaggcactcagggcttcccaagagaaacacagactccagctgaacacagagaaggaacagaagccccggaagaagacccagacgtgtgacacctctgtgcagatagaacccgtccacactgaggccttctccagcagccaagagcagcaatccttcagcgatctaggggtcaggtgcaaagggtcccggcacgaggaggtcattcagcgtcagaaaaaggccttatctgaacttcgagcgcgaattaaagaactcgag

SEQ ID NO: 250 - DNA (cDNA), 313 bp; double-stranded, linear
gaattcggccttcatggcctacccaaacagacagaaaacgccacgaggcaagtgtagtctctcacagcctggaccctctgtcagcagtccacatagcaggtccacaaaaggtggctccgattcctccctttctgagccagggccaggtcggtccggccgcggcttcctgttcagagtcctccgagcagctcttccccttcagcttctcctgctcctcctcatcgggcttgcctgccttgtaccaatgtcagaggaagactacagctgtgccctctccaacaactttgcccggtcattccaccctatgctcgag

SEQ ID NO: 251 - DNA (cDNA), 291 bp; double-stranded, linear
gtcttgacaaaacctaacttgcgcagaaaacaagatgagattggcatggctttatttgttttttttgttttgttttggttttttttttttttttggcttgactcaggagatccctccccggggctcccgccggcttctccgggatcggtcgcgttaccgcactggacgcctcgcggcgcccatttccgccactccggattcggggatctgaacccgactccctttcgatcggccgagggcaacggaggccatcgcccgtcccttcggaacggcgctcgcccaactctcgag

SEQ ID NO: 252 - DNA (cDNA), 384 bp; double-stranded, linear
cgggaaatgaagcggaagcaggcggagtccgagaggcccatcttgccagccaatcagaagctcattactttatcagtgcaagatgcacccacaaagaaagagtttgttattaaccccaacgggaaatccgaggtctgcatcctgcacgagtacatgcagcgtgtcctcaaggtccgccctgtctataatttctttgaatgtgagaacccaagtgagccttttggtgcctcggtgaccattgatggtgtgacttacggatctggaactgcaagcagcaaaaaacttgcgaagaataaagctgcccgagctacactggaaatcctcatccctgactttgttaaacagacctctgaagagaagcccaaagacagtgaagaactcgag

SEQ ID NO: 253 - DNA (cDNA), 276 bp; double-stranded, linear
gggacgttggtgttgaggttggcatacgtatcaaggacagtaactaccatggctcccgaagttttgccaaaacctcggatgcgtggccttctggccaggcgtctgcgaaatcatatggctgtagcattcgtgctatccctgggggttgcagctttgtataagtttcgtgtggctgatcaaagaaagaaggcatacgcagatttctacagaaactatgatgtcatgaaagattttgaggagatgaggaaggctggtatctttcagagtgtactcgag

SEQ ID NO: 254 - DNA (cDNA), 497 bp; double-stranded, linear
gagtttgttgggcttaccttattttaattaaaaagaagtcggggctaccaggggtttcagacgtgctcgatggacacgtgatttgtaaacagccaagattctgggggacgggggggtgcctcggtggggttgacatttgagttacagggacttaataatggccagcctttcacatcccatgggaaaccgcccccccgggccttggagaatgggggtccaagtgcctatccccctttggatgtaaaattcatcgttagtaaacatcatccgcccagcaacaagcaaagcacatcgcaagattaaaacaaagaatccgccgtgaacagaaggcctccatctctgctctcaggcaggtgtccttcagggaggagcctcaggcagctgttctaaccctgctgccaacgcctgggctgtttctgccgacaatcttctatttctctaaaagagtacgctgaacagctggctctgcgttgattgaattctagacctgcctcgag

SEQ ID NO: 255 - DNA (cDNA), 470 bp; double-stranded, linear
gaattcggccttcatggcctagagaaccgttgcttttccgagttgctcttcttccaggctccgttggtggtcggcatggcccgtggaaatcaacgagaacttgcccgccagaaaaacatgaagaaaacccaggaaattagcaagggaaagaggaaagaggatagcttgactgcctctcagagaaagcagagggactctgagatcatgcaagaaaagcagaaggcagctaatgagaagaagtctatgcagacaagagaaaagtgatgactggctatttggaaaacctgggtgctactgccaactgggtgtatcataagctctaagatcaagattttgtagagtggacagtcattacatatgttataacttatcctttaaaaactattttaaactttatcctttcagctttacttagtgcgatgttttagaagcagtcttcaaagaataaaacactaaccatgctgctcgag

SEQ ID NO: 256 - DNA (cDNA), 388 bp; double-stranded, linear
gaattcggccttcatggcctaattttgtatttttagtggagacggggtttctccatgttggtcaagctggtcttgaactcccaacctcgggtgatccgcccgccttggcctcccaaagtgctgggattacaggcgtgagccaccgcgcctggccagtagtttcttaacattaaattatccgcaaaatggaagaaatactagaggtctgtgaggatgtttcttctctttcagtctgttgtggtggtttgtagtttacaggggcttgggtaactggatttttaggtttattattttaaatagtagactcaacactattttgtattgcagtagagatcacttatgcagatctttttaataccatttcatagagattaagggtcacctcgag

SEQ ID NO: 257 - DNA (cDNA), 333 bp; double-stranded, linear
gaaacagggctcaaagaagtggtaactgctgtggaggaaatgacaagtaaaggaaaaccaggacaagaagtcttggaagacgaccaggaaaatactttaaaatatgagtatgaagaagactttgaagtagatgaggagaaacaaggtgaaaaatctaatgaagaaggacaggctgatgttcaaatgaatggaataccgcagtcacctttggatgataaaaaagataatttagaccctgaaaaagagagtgaaacctcatcacagaaggcaccagatgcccgtgacaatgtgaaagatgagaatgatggatgctctgagagtgaacgtctcgag

SEQ ID NO: 258 - DNA (cDNA), 544 bp; double-stranded, linear
cacagtgctggntcacaacaagatgntcnaggtgtcagccgtactgtgtgtgtgtgcagccgcttggtgcagtcagtctctcgcagctgccgcggcggtggctgcagccggggggcggtcggacggcggtaattttctggatgataaacaatggctcaccacaatctctcagtatgacaaggaagtcggacagtggaacaaattccgagacgatgattatttccgcacttggagtccaggaaaacccttcgatcaggctttagatccagctaaggatccatgcttaaagatgaaatgtagtcgccataaagtatgcattgctcaagattctcagactgcagtctgcattagtcaccggaggcttacacacaggatgaaagaagcaggagtagaccataggcagtggaggggtcccatattatccacctgcaagcagtgcccagtggtctatcccagccctgtttgtggttcagatggtcatacctactcttttcagtgcaaactagaatatcaggcatgtgtcttaggaaaacagaatctcgag

SEQ ID NO: 259 - DNA (cDNA), 393 bp; double-stranded, linear
gaattcggccttcatggcctacatcagcatccctgggagcatcagaaatgcagagctcaggcccgccccggagctaccgaatcagaacctacattttacacacccctcagctcagagcttgtttctccctggattccatggccctgtgctgctggcagcccggggttagggcatttcgttgtcacctggcgacggtgaagcctagtttcctccagagagattatgctgctctccatccaagtgaagtggcaatggtgccagcctgagatttctgccctgagttttaagtacgagagtgtgggctgacaataaactcctttattctaccctcttctgttctcataaggagaaatttaaattctggaagagatgaagcttgcatttacccaagac

SEQ ID NO: 260 - DNA (cDNA), 705 bp; double-stranded, linear
gaattcggccaaagaggcctaagggattgttattcctttaaaaaaaaaccaataccaaagaagcctacaatgttggccttagccaaaattctgttgatttcaacgttgttttattcacttctatcggggagccatggaaaagaaaatcaagacataaacacaacacagaacattgcagaagtttttaaaacaatggaaaataaacctatttctttggaaagtgaagcaaacttaaactcagataaagaaaatataaccacctcaaatctcaaggcgagtcattcccctcctttgaatctacccaacaacagccacggaataacagatttctccagtaactcatcagcagagcattctttgggcagtctaaaacccacatctaccatttccacaagccctcccttgatccatagctttgtttctaaagtgccttggaatgcacctatagcagatgaagatcttttgcccatctcagcacatcccaatgctacacctgctctgtcttcagaaaacttcacttggtctttggtcaatgacaccgtgaaaactcgtgataacagttccattacagttagcatcctctcttcagaaccaacttctccatctgtgacccccttgatagtggaaccaagtggatggcttaccacaaacagtgatagcttcactgggtttaccccttatcaagaaaaaacaactctacctacc

SEQ ID NO: 261 - DNA (cDNA), 729 bp; double-stranded, linear
gaattcggccaaagaggcctaccttacttgagtccacaggcaaggcccaataatgcatatactgccatgtcagattcctacttacccagttactacagtccctccattggcttctcctattctttgggtgaagctgcttggtctacggggggtgacacagccatgccctacttaacttcttatggacagctgagcaacggagagccccacttcctaccagatgcaatgtttgggcaaccaggagccctaggtagcactccatttcttggtcagcatggttttaatttctttcccagtgggattgacttctcagcatggggaaataacagttctcagggacagtctactcagagctctggatatagtagcaattatgcttatgcacctagctccttaggtggagccatgattgatggacagtcagcttttgccaatgagaccctcaataaggctcctggcatgaatactatagaccaagggatggcagcactgaagttgggtagcacagaagttgcaagcaatgttccaaaagttgtaggttctgctgttggtagcgggtccattactagtaacatcgtggcttccaatagtttgcctccagccaccattgctcctccaaaaccagcatcttgggctgatattgctagcaagcctgcaaaacagcaacctaaactgaagaccaagaatggcattgcagggtcaagtcttccgccacccccaacactcgag

SEQ ID NO: 262 - DNA (cDNA), 686 bp; double-stranded, linear
gaattcggccaaagaggcctactaccatgtcctcttggagcagacagcgaccaaaaagcccagggggcattcaaccccatgtttctagaactctgttcctgctgctgctgttggcagcctcagcctggggggtcaccctgagccccaaagactgccaggtgttccgctcagaccatggcagctccatctcctgtcaaccacctgccgaaatccccggctacctgccagccgacaccgtgcacctggccgtggaattcttcaacctgacccacctgccagccaacctcctccagggcgcctctaagctccaagaattgcacctctccagcaatgggctggaaagcctctcgcccgaattcctgcggccagtgccgcagctgagggtgctggatctaacccgaaacgccctgaccgggctgccctcgggcctcttccaggcctcagccaccctggacaccctggtattgaaagaaaaccagctggaggtcctggaggtctcgtggctacacggcctgaaagctctggggcatctggacctgtctgggaaccgcctccggaaactgccccccgggctgctggccaacttcaccctcctgcgcacccttgaccttggggagaaccagttggagaccttgccacctgacctcctgaggggtccgctgcaattagaacggcacattctcgag

SEQ ID NO: 263 - DNA (cDNA), 571 bp; double-stranded, linear
gaattcggccaaagaggcctaggagagaggaggtgctgcaagactctctggtagaaaaatgaagagggtcctggtactactgcttgctgtggcatttggacatgctttagagagaggccgggattatgaaaagaataaagtctgcaaggaattctcccatctgggaaaggaggacttcacatctctgtcactagtcctgtacagtagaaaatttcccagtggcacgtttgaacaggtcagccaacttgtgaaggaagttgtctccttgaccgaagcctgctgtgcggaaggggctgaccctgactgttatgacaccaggacctcagcactgtctgccaagtcctgtgaaagtaattctccattccccgttcacccaggcactgctgagtgctgcaccaaagagggcctggaacgaaagctctgcatggctgctctgaaacaccagccacaggaattccctacctacgtggaacccacaaatgatgaaatctgtgaggcgttcaggaaagatccaaaggaatatgctaatcaatttatgtgggaatattccactaattacggacagctcgag

SEQ ID NO: 264 - DNA (cDNA), 313 bp; double-stranded, linear
gaattcggccaaagaggcctaccaagcaagaacagctaaaatgaaagccatcattcatcttactcttcttgctctcctttctgtaaacacagtcaccaaccaaggcaactcagctgatgctgtaacaaccacagaaactgcgactagtggtcctacagtagctgcagctgataccactgaaactaatttccctgaaactgctagcaccacagcaaatacaccttctttcccaacagctacttcacctgctccccccataattagtacacatagttcctccacaattcctacacctgctccccccatactcgag

SEQ ID NO: 265 - DNA (cDNA), 343 bp; double-stranded, linear
gaattcggccttcatgcctagcctctgagttcagctcagaacacagatgatctcattgattcctcacgtcaaccttgggaaatctgggtaccctgggacgtccacacatgaggaccgaggctcagggacatcaagggactggcctggtcccagaaacagggagtaaaatgggaagtaaactcagtcccacgtctgcctgactccagagtttgggccactgaaccatgcggctgccatcttggagttctttgagctgtgaagtgctgtgcatcgtgtgattctgtgtcccttttgtgcaggtaccaggatttctatgcattcgacctgtcaggagccactcgag

SEQ ID NO: 266 - DNA (cDNA), 340 bp; double-stranded, linear
gaattcggccttcatggcctacaggaagcacagaaagacaaaattggaaatgtctagttccatgttgatgccttcagaagatgcaggtgaacaaagagaggccgggaaatcagagctagttgaaacccaacatgttaccttagagccagagctaccactgagttctctaagcacagtcaaatcccaggattatgctgaaacagagcaggaggtcattttacaagctatagaggccatggaggccacagaagccctggaggccacagacgccatggaagccatagatcaaggtagcatgaaagattatggagatgtgatctctaagctggaaagactcgag

SEQ ID NO: 267 - DNA (cDNA), 367 bp; double-stranded, linear
gaattcggccttcatggcctaggcacccctaggcgactcagggttcggggaggaggagaccagacggggccttggctggcatggcctcttcacagggctgccgtgaagaaacttcgtgacagcggcggagaggtggcccaggagtgagacaagcaggccccgggccttggactcagacatgctgggtccggtcaggcccgtgtgggaaccagtgttttagggactgggtactctcttagagaagaactgatgctaaagagtcaggaagacacgagcgggccaaataaaagaggaagagaggccctcaggacatcatggcacttactgcttggatttgtctccccgtccagaattctgtggactcgag

SEQ ID NO: 268 - DNA (cDNA), 320 bp; double-stranded, linear
gaattcggccttcatggcctacttgggaattaacatcttcgataaatcccagaagtctttaagtgacagtagagagcctacagagaagcctgggaaagcagaaaaatctaagagcccagaaaaagtgtcatcgttctcaaactcctcctccaacaaggaatcaaaagtaaacaatgagaagtttcgtactaagagccccaagcctgccgaaagcccccagtcagccactaagcagttggatcagcccactgctgcttatgagtattatgatgctggcaatcactggtgcaaagactgcaacaccatctgtgggactcgag

SEQ ID NO: 269 - DNA (cDNA), 542 bp; double-stranded, linear
gaattcggccaaagaggcctagggatatttactgagggcctacagggtgcccaatactgagctagctaggctcagggacctgtacacacatgcattctccattagggttctgcaatcctgacactattactatcctcaaggactctgcgcatccagacccgtctattagttagcaatgagaacccctgccatggccaagttacacaagaacacccttgccctacctctgccccctgcngatctgaaagtaacctggtctgaaagagaagtaaagatgtggctgtccctgggtgctagggagagaggcctgttgacaaagccaccagctgtctccagtcagagccagggagacaggcttctccctgcaccatccgcactgccatagacacagcagccagcaacagcacttggaccattacggagttccaggcccagtctccaactgacctccctcctgctccagctgcccatgctaacaagagccagggcacaagacctcacttggaacaagtaccaggcagaagagagcatnaccngccggt

SEQ ID NO: 270 - DNA (cDNA), 613 bp; double-stranded, linear
gaattcggccaaagagcctagtcgattgaattctagacctgcctccttttccacttgaattgttaaattgtttactccagcatctttaagtattcctgtaacctgctgtactattctttgttctagcacatcagatgtcacctgtatatgaattgttcctgccacaatactagcagaatgacgccaaaaatgtgggtctcggtatgatattaatccttcaattttctgtatcttttctaaagcaatatgtagttctttttcatattctggtggcaatctcaggagtagaacctggcaggcatctttaatcagtggaacaacactgagaaatattaatatagcaataaaaagagaacagagtgggtcagcgatgaaccatccaaactgctctataagaactgtggatacgatcacaccaatgctgccaagagtatctgccaaaacatgtagaaatacacccctcatgttagcattcatgcctccacccgcagatccgtggctgtgaccatgcccatggtcactgtgtccatgcatatgatgtgaatggctgtgatcagatgagtgacagcttccttgagcctaaaccgtcgattgaattctagactgcctcgag

SEQ ID NO: 271 - DNA (cDNA), 763 bp; double-stranded, linear
gaattcggccaaagaggcctagtctggttcttgcttgatctgagagcttccatcagtctcttttatttcttctgtggctggaacttccaactggcttggttcagctgattcttgtatcacggggccttctgactcactctgatcaaccagctggttattaatcacaagtcctggaaatggtctaatgaccgtgaatttgataaactcggcagagtctaagatccttctcatggagctgatttccaggtagctgggggctttgaaaggacacccccgggggcatgccatcaactaccacacagccagggttaattgtgatttccctgtagggaactttcacaggaaaacccataccaatagcttcaccaaatttccgactaaagaggtcattcacttgttctcttagctgtctagctttttcaactttcgagagtctttcattatcatcatctggaattgtcacctgaatgatgttaaggtcttcaacacctgatgcagtagtattaacattgggtgatgaatttatttttctgggagggctcttagaggaggtgctctccttaatcgccgtctcaaacatttcgggctttttaatgatgaacttaattttggctttgtttctgagtatcttctccagcctcggaatgccaaaagtcgatggtcttcggaatggcacaccctcaggtaagccttccacataaaagtcttccgggaaagactcaaataacgcgaacggcaccttcacagcttgtttaaggccaag

SEQ ID NO: 272 - DNA (cDNA), 102 bp; double-stranded, linear
gaattcggccaaagaggcctaattaaggaaatactttgcataaattaatcagccccacagtatttccttaataagaataaaatgaatttaacactgattctg

SEQ ID NO: 273 - DNA (cDNA), 565 bp; double-stranded, linear
gaattcggccaaanaggcctacnccagtcaaggaaagtcaagtngcaagaaggaantgtctaaaagagatggcaaggagaaaaaagacagaggagtgacgaggtttcaggaaaatgccagtgaagggaaggcccctgcagaanacgtctttaagaagcccctgcctcctactgtgaagaaggaagagagtccccctccacctaaagtggtaaacccactgatcggcctcttgggtgaatatggaggagacagtgactatgaggaggaagaagaggaggaacagacccctcccccacagccccgcacagcacagccccagaagcgagaggagcaaaccaagaaggagaatgaagaagacaaactcactgactggaataaactggcttgtctgctttgcagaaggcagtttcccaataaagaagttctgatcaaacaccagcagctgtcagacctgcacaagcaaaacctggaaatccaccggaagataaaacagtctgagcaggagctagcctatctggaaaggagagaacgagagggaaagtttaaaggaataggaaatctcgag

SEQ ID NO: 274 - DNA (cDNA), 188 bp; double-stranded, linear
gaattcggccaaagaggcctacttaaatcaaggccaaaactaaggatttaggtagagtgtattagcctttcaatacctgcttattaaacagttgttttcatacttttcaaaggtgtgtagaagttttgtaaataaattttctgataggataaactagattccctatgatctcttatttatttatcatt

SEQ ID NO: 275 - DNA (cDNA), 555 bp; double-stranded, linear
gaattcggccaaagaggcctagtccgtgatgcgtacacacctgtcgagcacgagctcctctaggcggtgcaggtcgcaggccacgtactccagcgccatgtcggtgatncgtgggcaccacgagaggtcaaggntgcgcagcttgcgcaggttctcggccacgagctccacgccgtcgtcggtgaccttggagcagcccgagaggctgaacgcggtgaggttgggcaggntgtgcaccacgttgaccacgccgtggttggtgatctcccagcaggagagcaggcgcagcgtgtgcgtgctgtggccctggcgcgccgtgaagtaggccagcgccgtgtccgtcacgtggtaggcctgcaggctcagctccgccaggttgggcagcagctgcgagatggccgcgatggcgtcgtcggccacgttgatgcagtcactcacgctcagcgaggtgatgcgcgcgctcaggctggaccacagcccggcctcggtgaagtcgttgcagcccgacagctccagacgcaccacgccctgcatctgttcaagcataacctcgag

SEQ ID NO: 276 - DNA (cDNA), 496 bp; double-stranded, linear
gaattcggccaaagaggcctacagtgaataatcagaagtcagtttgggagaagtcaaaatggacacaatcttcttgtggagtcttctattgctgttttttggaagtcaagcctcaagatgctcagctcaaaaaaataccgaatttgcagtggatctttatcaagaggtttccttatctcataaggacaacattatattttcaccccttggaataactttggttcttgagatggtacaactgggagccaaaggaaaagcacagcagcagataagacaaactttaaaacaacaggaaacctcagctggggaagaattttttgtactgaagtcatttttctctgccatctcagagaaaaaacaagaatttacatttaatcttgccaatgccctctaccttcaagaaggattcactgtgaaagaacagtatctccatggcaacaaggaattttttcagagtgctataaaactggtggattttcaagatacaaggctcgag

SEQ ID NO: 277 - DNA (cDNA), 491 bp; double-stranded, linear
gaattcggccaaagaggcctacacccagagactgtaatttgtgtagtttttcttttttaacttaaagacaactttaaaaaatacttacattaatgttttttatattcataggtgggtatattcgcctcattcaaatggcagtagccttggctcacataagacatgtttcatgtgatctgtatcctggcataccagttatattttgtggggactttaatagtacaccatcaacaggaatgtatcattttgtcatcaatggcagcattccagaggatcatgaagactgggcttccaatggggaggaggaaagatgcaatatgtctcttacacatttcttcaagctgaaaagtgcttgtggtgaacctgcttacacaaattatgttggtggctttcatggatgtctagattacattttcattgacttaaatgctttagaggttgaacaggtgattccattacctagtcatgaagaagttaccactccactcgag

SEQ ID NO: 278 - DNA (cDNA), 369 bp; double-stranded, linear
gaattcggccaaagaggcctacagagaacagataaaaataagcctgtggaatgaccactttgtggaatacggcagaaccgtgtgtatgtttcgcacagagaagattcggaagctcgtagccatgggcatccctgaatctttgcgagggagactctggcttctcttctcagatgcggtgacggatcttgcctcacaccctggttactacgggaatctggtggaggagtccctggggaaatgctgcctggtaaccgaggagatagaacgagacctgcaccgctccctgccagagcaccccgccttccagaacgaaacgggaattgctgctttgaggagagtcttgacggcctatgcccaccggagctcgag

SEQ ID NO: 279 - DNA (cDNA), 528 bp; double-stranded, linear
gaattcggccaaagaggcctactctccctttccactccctggtgttcccaggagtgagatgagggtggaggggcccagcacagcaccttcaacctcaggatgagagaggccctttcacaaaactctaaggcaggggaacaggaaacagagaaagccggagaaccccaggagggccccaagagcggattctggtgattattaatgtgcttgcccaatgaagaaagaatactggcactctctaggtatgatgagagcagacagcaaacgtggggcctgtctacagtgattcgctaccccaatgtatggtcatccacgttagaagcagcagtgaaaggcgtgttgcttttcattattaacttcaaatcccagtccctaaaccagctcttgacgcccctctgtcaggtgctaatcctggaaactggaggccacctggtctccactttaggtgaggaaaacctgggagaagccatcagactgcacctgtggcatgagatgctttgagacaggtcaagaggaggagctctcgag

SEQ ID NO: 280 - DNA (cDNA), 323 bp; double-stranded, linear
gaattcggccaaagaggcctacagtgtcggagtagatttgaaactggaggtgaaggtaggagtaagtgatagattttagaattagtgctcagagctgaaatatccagtccgtgaacttagaggccagccttcataccactgtgatgacaggaactaccctaatcttttctgtccttttctctctgctgtccctcgggctgccaggccagcagcaacacccacaggtaatctccccgctgactccatccacttgctctgccctctgccctctctgtgccccgttgcacctgagcgtacaccccagcagtggcatccaactcgag

SEQ ID NO: 281 - DNA (cDNA), 337 bp; double-stranded, linear
gaattcggccaaagaggcctactcagtcagtaccatgccagttaccttttttccttgtgacttaatgaattggattttcctcaatctgttatttgtaggaggtttgtatggggccagggtagatttccagatttctgcctcagaggtagtctttttcacatatgacacctgggtgtgtttctctgtgtggccacaagtcttctgcctctctaaaaaaatgtctagaccttctagaaggtcttttgccgctaattctgaactttccactccttcctttgcagctgtgattggagggacatggctccagcatgccaatgtaaaccaccgccccctcgag

SEQ ID NO: 282 - DNA (cDNA), 194 bp; double-stranded, linear
gaattcggccaaagaggcctaggctcttccacttaatttcatactttcaggtctggatgcccattttaattcttctgaaagcatgcctccttctggcttcaggactccatctccagccttatgatctaaaaataatggaaaattacccggtatcgttagagctacaccaaaattgcattgagccaaaactcgag

SEQ ID NO: 283 - DNA (cDNA), 296 bp; double-stranded, linear
gaattcggccaaagaggcctaaaatcatcatattcatagagatattaaaagtgcaaatatcttactggatgaagcttttactgctaaaatatctgactttggccttgcacgggcttctgagaagttttgcccagacagtcatgactagcagaattgtgggaacaacagcttatatggcaccagaagctttgcgtggagaaataacacccaaatctgatatttacagctttggtgtggttttactagaaataataactggacttccagctgtggatgaacaccgtgaaccactcgag

SEQ ID NO: 284 - DNA (cDNA), 456 bp; double-stranded, linear
gaattcggccaaagaggcctagcaacatccacgcagctgctcatcaggtacgagtgcttccatatccatttacccaccattggcaatttgaaaggaccatccagacccccataggatccacatggaacacccagagggctttccaaaagctgactactcccaaggtcgtcaccaagccaggccatatcattaaccccataaaagcagaagacgtgggctaccggtcttcctcaaggtcggacctgtctgtcatacagaggaatccaaaacgaatcaccacacgtcacaaaaaacagctgaagaaatgctctgtagattgagttgctggaggagtgacagccaggagccctgacttcacttcctttggtccagttttactctgatacagggtggattccaaaactggctcagtacattgcatgtagttaagccacattttaaaaataaaggctcgag

SEQ ID NO: 285 - DNA (cDNA), 150 bp; double-stranded, linear
gaattcggccaaagaggcctaaggtcggcctgttcatcttgattagcatccaggccttggaatatttcatcaatgacagctttatctttgatattcttgatggtgtttgcaagctcctttgtaagcagctgcttcagctcacccctcgag

SEQ ID NO: 286 - DNA (cDNA), 115 bp; double-stranded, linear
aatccaagcaataacccaagcaaaacttcagatgcaccttatgattctgcagatgactggtctgagcatattagctcttctgggaaaaagtactactacaattgtcgaactcgag

SEQ ID NO: 287 - DNA (cDNA), 278 bp; double-stranded, linear
ggaagaagatgctaggagaagactcagatgaagaagaggaaatggatacctctgaaaggaagataaatgctggtagccaagatgatgagatgggttgcacctggggaatgggagaagatgcagtagaggatgatgctgaagagaaccctattgtcttagagtttcagcaggaaagggaggccttttatataaaggatcccaaaaaggctctccaaggcttttttgaccgagaaggagaagaattagaatatgaatttgatgaacagggacaactcgag

SEQ ID NO: 288 - DNA (cDNA), 364 bp; double-stranded, linear
ggatttctgaggccaactgcccaatagtttccagtagaaacatggccataccagtctagaatttaaccttctcatttaatcaatagcacaatctaacctacacaagaataagcaatcaaacatccagtataacatgtttttcatttttactttcttgcggtcaatttttttaatgatctatttaaaattttttcaaaatgacaactactatggaatactgaatacaaagttcagtaacacaacattgataacaacaacagcagcaacaataccacaaccaccaccactgaatggtctgggcaccttcacaatggctgttgtacttagttacgaagaagagtggggacagaaaatgaagctcgag

SEQ ID NO: 289 - DNA (cDNA), 471 bp; double-stranded, linear
gactccatgcgtatgtcccacctaaaggtcggctctgctgccgacatccccatcaacatctcagagacggatctcagcctgctgacggccactgtggtcccgccctcgggccgggaggagccctgtttgctgaagcggctgcgtaatggccacgtggggatttcattcgtgcccaaggagacgggggagcacctggtgcatgtgaagaaaaatggccagcacgtggccagcagccccatcccggtggtgatcagccagtcggaaattggggatgccagtcgtgttcgggtctctggtcagggccttcacgaaggccacacctttgagcctgcagagtttatcattgatacccgcgatgcaggctatggtgggctcagcctgtccattgagggccccagcaaggtggacatcaacacagaggacctggaggacgggacgtgcagggtcacctactgccccacagagctcgag

SEQ ID NO: 290 - DNA (cDNA), 281 bp; double-stranded, linear
gaattcggccttcatggcctagattgagtcacattgttctctttgatccattttcttttagacaacatcactcaaacaaccctattacttcagtagcaatgaactgtctctggattttattaagcatctcactagttccttttcttcagctgtatggcaccctgtcttcctgtacaccagaggctcctcagctgggtaaggtgagccaacgttaccaggagtatatgctgagaggccatttcaaagtctttcatagaaggctgtgcttgggcaaactcgag

SEQ ID NO: 291 - DNA (cDNA), 250 bp; double-stranded, linear
gaaactctgcccctgaaggtttgttttctaattcagaggtttaaattaatctagcccacttaataaaaccagagatcctatgggaaatttagcctaagacagtgctggaaattgccatatgttgatacaaagaagtgtttggccacattacaggtctcagactcaactgctatgtgtgactgccgctctgtgcctatgtcttgcttttttgctgagttccctatttccatatctccaggtgatcctcgag

SEQ ID NO: 292 - DNA (cDNA), 264 bp; double-stranded, linear
gaaatgtcagaggcacataagcttttacaaaaattgttggttcattgtcagaaactgaagaacacagaaatggtgatcagtgtcctactgtccgtggcagagctgtactggcgatcttcctcccctaccatcgcgctgcccatgctcctgcaggctctggccctctccaaggagtaccggttacagtacttggcctctgaaacagtgctgaacttggcttttgcgcagctcattcttggaatcccagaacaggcccaactcgag

SEQ ID NO: 293 - DNA (cDNA), 416 bp; double-stranded, linear
gaattcggcccttcatggcctaggtttctccgtgttggtcaggctggtctcgaactcctgacctcaggtgatccacctgcctcagcctcccaaagtgctgggattacaggcatgagccaccatgtcctgctataaataacttttaataggctctttttctggcttttttttttagtaactcagcccattttcttcttctcaatctggtctttgttaatgttgataacgctgtcttacttttaaattgccgtgattagaaattactagagatatataaacctagtcttttgggggattttgaaagggtcatagtattcttactgtctttcaaaatgtaccttatatttgaacattggaagatacgtgttgctgaatacaagttagtttcatacacacacatacacatgacactcgag

SEQ ID NO: 294 - DNA (cDNA), 458 bp; double-stranded, linear
gaattcggccttcatggcctactccattcccagatagaaagcttgaatgaagagttggtccagctgcttctcatccgagatgagctgcacacagagcaggatgccatgctggtggacattgaagacttgaccagacatgctgaaagtcagcagaagcacatggcagagaaaatgcctgcaaagtgaaaagaagccattcaaccagagaacaagctagaatttattttgcttctgtggttgtaaaaatgctgttgctaaaggtggcgcagaaacaaatatcagtgttagtcattgataatgtctgaagcttaatgtccagtgattggcctttgcttcttaatttattttaattttttacttgtgccacttaatatcaggcattttaataaaatattgttacaaaaaatgtacagtactgacaccaccacaaatcatggttaataaaagagagtctcgag

SEQ ID NO: 295 - DNA (cDNA), 302 bp; double-stranded, linear
gtgtaaaaccaatgccaggaaaaccaaatacacaaaaccctccacggagaggtcctctgagccagaatgggtcttttggcccatcccctgtgagtggtggagaatgctcccctccattgacagtggagccacccgtgagacctctctctgctactctcaatcgaagagatatgcctagaagtgaatttggatcagtggacgggcctctacctcatcctcgatggtcagctgaggcatctgggaaaccctctccttctgatccaggatctggtacagctaccatgatgaacagcagtctcgag

SEQ ID NO: 296 - DNA (cDNA), 412 bp; double-stranded, linear
catggatctgcctcctgagagggatggagagaaggggaggagcacaaagcctggctttgccatgccaaaacttgcacttcccaaaatgaaggcttctaagagtggggtcagcctgccacagagagacgtggatccttccctttctagtgccacagcagggggtagctttcaagacacagaaaaggccagcagtgacggtggtaggggaggacttggtgcaacagcaagtgccacaggaagtgagggtgtgaacctccaccggccacaggtccacattcccagtttgggctttgccaaacctgatctcagatcctccaaggccaaggtggaggtgagccagcctgaagctgacctgcctcttcccaaacatgatctgtctaccgaaggtgacagcagaggatgtgggctcgag

SEQ ID NO: 297 - DNA (cDNA), 308 bp; double-stranded, linear
gtgctggtggcgcggggagtgcgcgtcaaggtgaacgaggcctaccggttccgcgtggcactgcctgcgtacccagcgtcgctcaccgacgtctccctggcgctgagcgagctgcgccccaacgactcaggtatctatcgctgtgaggtccagcacggcatcgatgacagcagcgacgctgtggaggtcaaggtcaaaggggtcgtctttctctaccgagagggctctgcccgctatgctttctccttttctggggcccaggaggcctgtgcccgcattggagcccacatcgccaccccaatctcgag

SEQ ID NO: 298 - DNA (cDNA), 269 bp; double-stranded, linear
gaataagtaaattcatggaaaggaagaaattaaaagaaagtgaggaaaaggaagtgcttctgaaaacaaacctttctggacggcagagcccaagtttcaagctttccctgtccagtggaacgaagactaacctcaccagccagtcatctacaacaaatctgcctggttctccgggatcacctggatccccaggatctccaggctctcctggatccgtacctaaaaatacatctcagacggcagctattactacaaagggaggtctcgag

SEQ ID NO: 299 - DNA (cDNA), 458 bp; double-stranded, linear
gagcgacctttggaatagttaagcacaggtcattgtggacatgaattcaggcctctgtactaaaatctatttcagggaatgttctgtctagtgatttgctcaccatttgatatataatgaattataggacaagtataagctgatctgctatagctgtccatcagagagaatacacgtggctataacatctataacaaaacgacgattcctctacaagaggctgtttctcactgctaacgttggtgtttctggcgtgggaagaaatgcacaggcgtgcatggcatgcacgttcagacagctgcattgtaagagttctgtcatgcagtctgaaaagggaagaaacaggatggctttctgtagccacacctgtgaggcgtgatgattgttgtattattagattactgatttttcttttctgaaaatacatttgagttttaatcacatctgtggaactcgag

SEQ ID NO: 300 - DNA (cDNA), 99 bp; double-stranded, linear
gggatgcctgttcttggggtagagaagtcaggtagcccagggcccgcactctcaatagaccttcagagaaaaggcatcgaggtaaatgccgcactcgag

SEQ ID NO: 301 - DNA (cDNA), 569 bp; double-stranded, linear
ggtctaacagtaacactactcaagagaccctggaaataatgaaagaatcagaaaaaaaactggtggaagaatctgtaaacaaaaacaagtttatatctaagactccaagtaaggaagaaattgagaaagaatgtgaagataccagtttgcgtcaggagacacagaggcggacatctaaccatggtcatgccaggaaaagagccaagtctaattccaagctaaagttggtgcgtagcctggcagtgtgtgaggagtcctccaccccatttgctgatgggccattagaaacccaggatataattcaattgcacatcagttgcccttctgacaaggaggaagaaaagtccacaaaagatgtctctgaaaaggaagacaaggacaaaaacaaagaaaagatcccaaggaagatgctgtccagagactccagccaggaatatacggactccactggaatagacctacatgaatttcttgtaaatacactgaaaaagaacccaagggacagaatgatgctgctaaaattagaacaggagattctggaatttattaatgacaacaacccactcgag

SEQ ID NO: 302 - DNA (cDNA), 311 bp; double-stranded, linear
gcgattgaattctagacctgccacccaaaccccaactctcagacttacctcccaaaccacagatgaaggacctgccccccaaaccacagctgggagacctgctagcaaaatcccagactggagatgtctcacccaaggctcagcaaccctctgaggtcacactgaagtcacacccattggatctatccccaaatgtgcagtccagagacgccatccaaaagcaagcatctgaagactccaacgacctcacgcctactctgccagagacgcccgtaccactgcccagaaaaatcaatacgggggcactcgag

SEQ ID NO: 303 - DNA (cDNA), 683 bp; double-stranded, linear
acagcatgaaggcagaagccaatgccctgcatcacaaacacgacaagaggaagcgtccggggaagaatgcacccccaggaggtgatgagccactggcagagacagagagtgaaagcgaggcagagctggctggcttctccccagtggtggatgtgaagaaaacagcattggccttggccattacagactcagagctgtcagatgaggaggcttctatcttggagagtggtggcttctccgtatcccgggccacaactccgcagctgactgatgtctccgaggatttggaccagcagagcctgccaagtgaaccagaggagacctaagccgggacctaggggagggagaggagggagagctggcccctccccgaagacctactaggccgtcctcaagctctgtcaaggcaagccctggactcggaggaagaggaagaggatgtggcagctaaggaaaccttgttgcggctctcatcccccctccactttgtgaacacgcacttcaatggggcagggtcccccccagatggagtgaaatgctcccctggaggaccagtggagacactgagccccgagacagtgagtggtggcctcactgctctgcccggcaccctgtcacctccactttgccttgttggaagtgacccagccccctccccttccattctcccacctgatctcgag

SEQ ID NO: 304 - DNA (cDNA), 653 bp; double-stranded, linear
gaattcggccaaagaggcctagagatgtctactctcagctcacgcctgtaatcccagcattgtggggaggtcaagttgggtggattgcttgagcccaggagtttgagaccagcctaagcaataggcaaaaccctgtctctacaaaaatcagccaggtatggtagtgtgtacctgtagtcctagctactcaggaggctgaggtgggaggatcgcttgagcctgggaggtgaaggctgaaattagccatgatcatgccactgcaccccaagcctgggcaacagagcaagaccttgtctcaaaaaaaaaaggatgagctaggtttgtatctgtagacagagatttatgattaattggtaggtgaaaaagtgtattaaagtacagttatagattagagtacaaaatgaatgagtatatatgcgtttaaaagtatgtatacatatcaggaaaggttacatgaggattttcactttccactttatatctcccagtatttgaatttttaataacaatctttttatcataaaactatattaaattaaacttttagattttttagtggtataagtagaacaggaaccctaatacattgttttctacttttgtgataaagataattcatgatagatgaagttgcaaaccgaaagatcctcgag

SEQ ID NO: 305 - DNA (cDNA), 442 bp; double-stranded, linear
gaattcggccttcatggcctaaggtattccaaaatgtctaatttattttatccgatggtaaatgtaataattaaagaaagaggaaagaatcatgaaaggtggcccttaaagagggcttctggcagagttaggtcagaggcacactttcttacagactaagagtttttaagtactcaaggtgatgtttatcagaagcttggactgcttctgtgtctttttattgtgcttatctgggagggagagttctgtgtctgctcctatacatctttctgcagctgcagacatactccctgagtctgcttttagctttcctatcttagtgcacctgaagggaaaggaatgagcttattaaggcccactgttttactggggcccattgtatgagagtgaagtttggcagttacccaagagacgttcccctcacctccctccggcgctcgag

SEQ ID NO: 306 - DNA (cDNA), 412 bp; double-stranded, linear
gaattcggccttcatggcctaccaatatgcaaatcagtacctcttctcttagaggtgttcatgcccaagctcctcagacaagtccatcccactgtgtgggaggaagttgaagggtgaggatttttaagatttttatcttgcttgaagttgtgaagactcaatgacaaatggctaggttttgaaggggtcttggaagtcattactggggatagacccctcttgatacttgtcacattaatatctgcccagactctcacacattcagatgtttaacgtcacatgcattaagttcttttggttgcatgagacagtgatgcacagaaactcacttaggaaaggagataggtggcaataaagaaaacagggatttcataggaatgcagtaaaaaaaaaaccatggcctaatctcgag

SEQ ID NO: 307 - DNA (cDNA), 239 bp; double-stranded, linear
ggggttgtctgaggcccagaggtcgtataagggccgctctacggtgtcctggggcccgggcttggcccttgttgcagaagggttgaggagccgggctgggccctgcgcacctcccggggcagctcgccctgcttggccagcttctcccatagctgctccttccgcctgagcttcttggcgttggggacctggtgggcgaggacgtctttgggggcagggactttggatgtgttctcgag

SEQ ID NO: 308 - DNA (cDNA), 533 bp; double-stranded, linear
gcgcaccatcctgggaagtgcatgtctcagaccaactccaccttcaccttcaccacctgtcgcatcctgcatccttcagatgagctcactcgggtcacaccaagccttaactcagccccaactccagcttgtggcagcaccagccacttgaaatccacgccggtggccacaccatgcactccacggagactgagcctggctgagtccttcactaacacccgtgagtccacgaccaccatgagcacatccctggggctcgtgtggctgttgaaggagcggggcatttctgctgccgtgtacgacccccagagctgggacagggccggccggggctccctcctgcactcctacacgcccaagatggctgtgatcccctctactccgccgaactcgcctatgcagacacccacatcctccccaccctcctttgagttcaagtgcacgagccctccctacgacaatttcctggcttccaagccagccagctccatcctgagggaagtgagagaaaagaacgtccgcaggacctcgag

SEQ ID NO: 309 - DNA (cDNA), 297 bp; double-stranded, linear
gaattcggccaaagaggcctaccctaaaacatttatttcaaggagaaaagaaaaagggggggcgcaaaaatggctggggcaattatagaaaacatgagcaccaagaagctgtgcattgttggtgggattctgctcgtgttccaaatcatcgcctttctggtgggaggcttgattgctccagggcccacaacggcagtgtcctacatgtcggtgaaatgtgtggatgcccgtaagaaccatcacaagacaaaatggttcgtgccttggggacccaatcattgtggcaagatcctcgag

SEQ ID NO: 310 - DNA (cDNA), 248 bp; double-stranded, linear
gaattcggccaaagaggcctagggtttaagagctgtggaggactgaaaactggataaaaagggggtccttttccttgcccctgtctctcactcagatgcgcttctttttcgccactgtttggcaaagttttctgttaagcccccagttctccaggtgcgttactatttctgggatcatggggtcagttttaggacacttgaacacttcttttcccccctccccagttctccaggtgcgttacctcgag

SEQ ID NO: 311 - DNA (cDNA), 343 bp; double-stranded, linear
gaattcggccaaagaggcctaggtaaataactaatattgatgtatttttatattttaatatagactagtaaactatgcagagttaagtgttacattagaatcttgaactctcctaacatttctcttcctcagtttcctattgttttggtagagtatgtagacatttgcgagattaatttagagttggtagatacattctggatttcattttactttagatagcaggtttggcactttaaatatatttaattcagtaagagaataactgagtatgagctgtatcctcatcttactgttgaagacatcccaaatagttgggtgtgcactgtggcgggatctcgag

SEQ ID NO: 312 - DNA (cDNA), 268 bp; double-stranded, linear
gaattcggccaaagaggcctacggggaggcgcgcccgcgctgagtcggcggcgggtagccactccatgcccttgtccgatggtttgcaactccgattttgcacaccgctccaccgtgccccccagcgcacacccattcacactcacgccaacactctcgctgaacacttttataattgttaggcgtggccgttgggactttgggcgcagcgcggctgatactgcgtctggaggattgatatttacttttgcattgcggttacctcgag

SEQ ID NO: 313 - DNA (cDNA), 354 bp; double-stranded, linear
gtctctcgccgccggaggaagatgangctgaagattggattcatcttacgcagtttgctggtggtgggaagcttcctggggctagtggtcctctggtcttccctgaccccgcggccggacgacccaagcccgctgagcaggatgagggaagacagagatgtcaatgaccccatgcccaaccgaggcggcaatggactagctcctggggaggacagattcaaacctgtggtaccatggcctcatgttgaaggagtagaagtggacttagagtctattagaagaataaacaaggccaaaaatgaacaagagcaccatgctggaggagattcccagaaagatatcatacttctcgag

SEQ ID NO: 314 - DNA (cDNA), 514 bp; double-stranded, linear
gaattcggccaaagaggcctagtgcaagaacatgaagcacctgtggtttttcctcctgctggtggcagctcccagatgtgtcctgtcccaggtgcacctgcaggaatcgggcccgggactgttgaaaccttcggacaccctgtccctcacctgctttgtctcgggttactccctcagtagtgttcactattggggctggatccgccagtccccagggaaaggactggagtggattgggaacatccatcacaatggtagaaccaattacaacccgtccctcgccagccgcggttccatctcagccgacacgtccaagaactccctctccctgaatctgacctctgtgaccgccgcagactcggccgtctatttctgtgcgagcggccctattgcctcctttgaatcgacgactctaaaggtgggcggagactttcactcctggggccagggaatcctggtcaccgtctcctcagcatccccgaccagccccaaggtcttcccgcacagcctcgag

SEQ ID NO: 315 - DNA (cDNA), 215 bp; double-stranded, linear
gaattcggccaaagaggcctaggacactagaattattagtgttcattttcatctaagatctttattctctaacgttcttggtcctattgaaacattgcagtatgcaaaactactgcaatgttaaacccaagagaaaagccattatcatgtgtatgctggtcatcatgatcagtgtggtacaatttttaaaaataaactatcatgcccttctcgag

SEQ ID NO: 316 - DNA (cDNA), 788 bp; double-stranded, linear
gaattatgtacgccctcttcctcctggccagcctcctgggcgcggctctagccggcccggtccttggactgaaagaatgcaccaggggctcggcagtgtggtgccagaatgtgaagacggcgtccgactgcggggcagtgaagcactgcctgcagaccgtttggaacaagccaacagtgaaatcccttccctgcgacatatgcaaagacgttgtcaccgcagctggtgatatgctgaaggacaatgccactgaggaggagatccttgtttacttggagaagacctgtgactggcttccgaaaccgaacatgtctgcttcatgcaaggagatagtggactcctacctccctgtcatcctggacatcattaaaggagaaatgagccgtcctggggaggtgtgctctgctctcaacctctgcgagtctctccagaagcacctagcagagctgaatcaccagaagcagctggagtccaataagatcccagagctggacatgactgaggtggtggcccccttcatggccaacatccctctcctcctctaccctcaggacggcccccgcagcaagccccagccaaaggataatggggacgtttgccaggactgcattcagatggtgactgacatccagactgctgtacggaccaactccacctttgtccaggccttggtggaacatgtcaaggaggagtgtgaccgcctgggccctggcatggccgacatatgcaagaactatatcagccagtattctgaaattgctatccagatgatgatgcacatgctcgag

SEQ ID NO: 317 - DNA (cDNA), 214 bp; double-stranded, linear
gaattcggccaaagaggcctaaatcatcctgatgatggttttcttacataaacatgagcttctgaccatgtaccatggatgggttctcacttcctgctatatcctgatcatcactattgcaaatattgcaaatttggccagtactgctactgcaatcacaatccaaagggattggattgttgttgttgcaggagaagacagaagcaaactcgag

SEQ ID NO: 318 - DNA (cDNA), 267 bp; double-stranded, linear
gttgtcttttttcccctttatagctgctggagtgaattttagaaagcctaagtcatacatcacattgcttcatgggcatcccagtacactttggattttattttacatccttactgatctgattctcatctctgtctcttcatggttctctgccttctagttacactggtgacctttcaaaacctttaccacattgagttcattccttacttttcactctttctctgcctggagtgttctgccccatctttacgtggcacgctcgag

SEQ ID NO: 319 - DNA (cDNA), 256 bp; double-stranded, linear
gaagctttcaggctatcttctagtcaagatgagtgataagccagacttgtcggaagtggagaagtttgacaggtcaaaactgaagaaaactaatactgaagaaaaaaaatactcttccctcaaaggaaactatccagcaagagaaagagtgtgttcaaacatcataaaatggggatcgcctcccaacagcagatttcgacattacctgagagtcttgattttaggcttgttttttgtaaacccatgtgttctcgag

SEQ ID NO: 320 - DNA (cDNA), 304 bp; double-stranded, linear
gctgcgtgtgatggagaccaaacccgacaaggcagtgtccatcattgagtgtgacatgaacgtggactttgatgctcccctgggctacaaagaacccgaaagacaagtccagcatgaggagtcgacagaaggtgaagccgaccacagtggctatgctggagagctgggcttccgcgctttctctggatctggcaatagactggatggaaagaagaaaggggtagagcccagcccctccccaatcaagcctggagatattaaaagaggaattcccaattatgaatttaaacttggcgcgctcgag

SEQ ID NO: 321 - DNA (cDNA), 298 bp; double-stranded, linear
gaattcggccaaagaggcctactcttacaccttccgctccgtgggcaccttcaatatcatcgtcacggctgagaacgaggtgggctccgcccaggacagcatcttcgtctatgtcctgcagctcatagaggggctgcaggtggtgggcggtggccgctacttccccaccaaccacacggtacagctgcaggccgtggttagggatggcaccaacgtctcctacagctggactgcctggagggacaggggcccggccctggccggcagcggcaaaggcttctcgctcaccgtgctcgag

SEQ ID NO: 322 - DNA (cDNA), 320 bp; double-stranded, linear
gcgccgtgtccttttgcgttggtaccagcggcgacatgacggggtacactccggatgagaaactgcggctgcagcagctgcgagagctgagaaggcgatggctgaaggaccaggagctgagccctcgggagccggtgctgcccccacagaagatggggcctatggagaaattctggaataaatttttggagaataaatccccttggaggaaaatggtccatggggtatacaaaaagagtatctttgttttcactcatgtacttgtacctgtctggattattcattattacatgaagtatcatgtttctgaaaaactcgag

SEQ ID NO: 323 - DNA (cDNA), 307 bp; double-stranded, linear
gcaaaaatctcaggccccagaaaagcctcttgtcatctctcagatgggttccaaaaagaagcccaaaattatccagcaaaacaaaaaagagacctcgcctcaagtgaagggagaggagatgccggcaggaaaagaccaggaggccagcaggggctctgttccttcaggttccaagatggacaggagggcgccagtacctcgcaccaaggccagtggaacagagcacaataagaaaggaaccaaggaaaggacaaatggtgatattgttccagaacgaggggacatcgagcataagaaggaactcgag

SEQ ID NO: 324 - DNA (cDNA), 299 bp; double-stranded, linear
gcacttctgagaggatgctgggaatctgcagggggagacggaaattcttggctgcctcgttgagtcttctctgcatcccagccatcacctggatttacctgttttctgggagcttcgaagatggaaagcccgtgtctctgtcaccgctggagtcccaggcacacagccccaggtacacggcctccagccagcgggagcgcgagagcctggaggtgcgcatgcgcgaggtggaggaggagaaccgcgccctccgcaggcagctcagcctggcccagggccgagccccacccatcctcgag

SEQ ID NO: 325 - DNA (cDNA), 292 bp; double-stranded, linear
gaattcggccttcatggcctactccaaactcatgcccttgtttttatctctgcccttggatggctgtcttctattttcactcacaatttcaacacattttgacttgctcgtgtcacctagggtttccgcctcaggtatgtcttcttccttaatttctttgccgtctttggtgctgttgacctcaccctttctggggtcttcctattggtctcagcttcaggtttgcagccgcccctggtttcctgaacattccttctgtggggtcttcccctccttctcacccaccctcgag

SEQ ID NO: 326 - DNA (cDNA), 345 bp; double-stranded, linear
gaattcggccttcagacttgaagtggagaaggctacgatttttttgatgtcattttgtgtaagggcgcagactgctgcgaacagagtggtgatagcgcctaagcatagtgttagagtttggattagtgggctattttctgctagggggtggaagcggatgagtaagaagattcctgctacaactatagtgcttgagtggagtagggctgagactggggtggggccttctatggctgaggggagtcaggggtggagacctaattgggctgatttgcctgctgctgctaggaggaggcctagtagtggggtgaggcttggattagcgtttagaagggcaaactcgag

SEQ ID NO: 327 - DNA (cDNA), 474 bp; double-stranded, linear
gaattcggccttcatgncctacctttccgtccgttctttcacgccttcctcctcattttccttccttctattttcccttccctctttccgctttcctgccccgtttccttcctccctcccttcctccttccttccttcctctgcgttcttcctctctcctttgttccttcctcctcctccccactcccttttcctctcctcttcccaccccagtctcctactccccagtcctcccatccccatggaacatacacctgctttgtctgggagccacgttattcctgccagccagaccctggccaggaggatcagggtcacggtcagcttgggccgagaacccttcacatgagacaagctcctctgccagggtttcctgtgggaaaggccccacttcccgaccctcctgggccactgcatggggtcccctcttcggcttcttctcccctctccacccggcagcccccccagctcgag

SEQ ID NO: 328 - DNA (cDNA), 556 bp; double-stranded, linear
gaattcggccaaagaggcctaatttactccccaatataaaacattttacctgcgatctatgtgtacatattgaatgatgtgtaacaatatcataatttttatgttctgcattttttcacttatatatctttatttaaatggacttaactttactaatggagtaatttttagctttcagaaggagttctcactcgaagataaagaacagctcgctaaccacgaaagaggaatcgatgctcagcttttagttgcacttcctaaagttgcagaattaagacaaatctttgaaccaaagaagaaagaattcttagaaatgaaaagaaaagaaagaattgccaggcgcctggaagggattgaaaatgacactcagcccatcctcttgcagagctgcacaggattggtgactcaccgcctgctggaggaagacacccctcgatacatgagagccagcgaccctgccagcccccacatcggccgatcaaatgaagaggaggaaacttctgattcttctctagaaaagcaaactcgatccaaatactgcacagaaaccctcgag

SEQ ID NO: 329 - DNA (cDNA), 385 bp; double-stranded, linear
gaattcggccaaagaggcctacaaaaccatccataaataaacaaagctaagaaagctaagaaacaaagctaagaaacaaagactgaggtgagggagatttgagtatttttttttcctctaccaacaagtgaagaattgaacaccttaatccatctgatctcccaggtggaagccacaaatctttttttttgttttgctcagcatattggcacagtgagaaattcattttatactctctggcatctctcttgtaaactcaccaagtctcaataagttcacaaagaaggcagagacaaataaccctagaatgcaggtgattgtttatttatgtattttccttgttacatacccacctatacccaaggcctttgcagaaaagctcgag

SEQ ID NO: 330 - DNA (cDNA), 696 bp; double-stranded, linear
gaattcggccaaagaggcctaggaagcaggagtttatttttatccttttgtaagtattaactcggtaatcacaacaaacacggagcaatctcaatgctgtttatccggaggacagtctgcggggtcgtgacgattcttttcttcttgaagtttttccttttcctgaatctcataatgattcttggccatgattctgtcttttcaatgactgtggcttctactcgaacaagatcctttccgaggagtggcttgccaagcagcgtgaagttgtctgccccaaccagcaggaccttctccagtcgaattctctctccacacgcaaggtctagttcatttccaattaagatcaggtcttcagaggtcaccttccactggcggctggcaaagtgcaccacggcaaagagcctgccatactgccccgtgacgatcatctcattcactttcttcacgacctctgcatggtgtctggtctcctcaactgggtctggcagaacaacttctggccaaggtggtgaactcagggatgttttaggaacatatcctggtagatatgaagtgctctgtgaattgaaccttcgagaagcagaccaaagggaggctgctccgggccccgaaggtctcaggatgctgtggctgcacgcggacgccagccgccctaaggtgaccgtcagggaagatgctgccatggccgccgcc

SEQ ID NO: 331 - DNA (cDNA), 378 bp; double-stranded, linear
gaattcggccaaagaggcctaattttttgtacatctgggcccttagtttttattctgtttattatatgtctctgtctctctctattgtgtgtgtgtgtgtgtgtgtgtgtgtgtgtgtgtgtgtgtgtgtgtggtgcaggagtgccacccccagggccctgtcaacctctcttttctcctccatggctgtctgcctgcgtatctgtctctgagaatcctcggggcggtcaggggatgtcaggaggggaaggagccgccctccctatcttgctgctcctcttggcactcaggggcaccttccatggagccagaccgggtggaggggcttctgggatttggtgtctgctgctgccagagcaggaacccccagtactcgag

SEQ ID NO: 332 - DNA (cDNA), 394 bp; double-stranded, linear
gaattcggccttcatggcctacattgggattattggtgctgtgaccatggctggcatcatggcggcagacagaagtgaatcacctagtttgacccaagagagagccaacctgagcgatgagcagtgcacacaggtgacctccttgttgcagttggttcattcctgcagtgagcagtctcctcaggcctctgcactttactatgatgaatttgccaacctgatccaacatgaaaagctggatccaaaagccctggaatgggttgggcataccatctgtaatgatttccaggatgccttcgtagtggactcctgtgttgttccggaaggtgactttccatttcctgtgaaagcactgtacggactggaagaatacgacactcaggatggactcgag

SEQ ID NO: 333 - DNA (cDNA), 547 bp; double-stranded, linear
gaattcggccaaagaggcctacttattttcctgtgaaaatgcctaccacaaagaagacattgatgttcttatcaagctttttcaccagccttgggtccttcattgtaatttgctctattcttgggacacaagcatggatcaccagtacaattgctgttagagactctgcttcaaatgggagcattttcatcacttacggactttttcgtggggagagtagtgaagaattgagtcacggacttgcagaaccaaagaaaaagtttgcagttttagagatactgaataattcttcccaaaaaaactctgcattcggtgactatcctgttcctggtcctgagtttgatcacgtcgctgctgagctctgggtttaccttctacaacagcatcagcaacccttaccagacattcctggggccgacgggggtgtacacctggaacgggctcggtgcatccttcgtttttgtgaccatgatactgtttgtggcgaacacgcagtccaaccaactctccgaagagttgttccaaatgctttacccgactcctcgag

SEQ ID NO: 334 - DNA (cDNA), 397 bp; double-stranded, linear
gaattcggccttcatggcctaggggaaattgagtcaagaaaaggttcaatattttttaatggtagaattgaccgtatgtgtatgtgcttctagaagtgattcaggagagagggtggaatggatggtgtgggacggagggaagaattggtggaatgatgttggcaaaaaggaataggcttttgtgcataagttgagggattggccttgcctagaaacatggacaattcgtctatagtaagaagagaaaaggtagatctatgaccacagacatagtcagataatcattttaaaattctttaatcaatagatgtttctgatgtatggcaggcagtaagctaagcagtttacatacctgatttcatttagttattataacaatcccagtctaaaactcgag

SEQ ID NO: 335 - DNA (cDNA), 313 bp; double-stranded, linear
gaattcggccttcatggcctactccatccttaaggtcaccattggtatgttcctgctctctggagatccctgcttcaagacgccaccatcgactgccaagtccatctccatcccaggccaggattcctccctgcagctgacgtgtaagggtggtgggaccagcagtgggggcagcagcaccaactccctgactgggtcccggccccccaaggctcggcccactattctcagctcagggctgccagaggaacccgaccagaacctgtccagccctgaggaggtgttccactctggccactcctcgcaactcgag

SEQ ID NO: 336 - DNA (cDNA), 467 bp; double-stranded, linear
gaattcggccaaagaggcctagattgaattctagacctgcctcggcctcccaaagtgctgggattacaggcttgagccaccacacctggcctagtgatttgtaatttcatgagctgttgctgtattgccttccacagacagtcaatttataatccctcagtattatataatcaggaagattcagtgaatggaattttgggttggtggaggacatattttttaattggtagaccactgagtgcttttgcaaatctccttaaatcacattacagcaggaacaactatagaaaatacaattatttaggagcaacctgatctgtgagctaatttaatgagtggagcccagcctacatgctgaagagctcacatgcctcctacctagttccttaactaggttttcactcatgcccattttgtcatactcttgaaaccttcctatctttgcatagaacattattctttccact

SEQ ID NO: 337 - DNA (cDNA), 348 bp; double-stranded, linear
gaattcggccaaagaggcctacttctttgaagaaccatgaagtcacactatattgtgctagctctagcctccctgacgttcctgctgtgtctccccgtgtcccagagctgtaacaaagcactctgtgccagcgatgtgagcaaatgcctcattcaggagctctgccagtgccggcctggagaagggaactgcccctgctgtaaggagtgcatgctgtgcctcggggccctgtgggacgagtgctgcgactgtgtcggtatgtgcaaccctcggaattacagcgacaccccgcccacatccaagagcaccgtggaggagctgcacgagcccattccgtccgctgtcgag

SEQ ID NO: 338 - DNA (cDNA), 259 bp; double-stranded, linear
gaattcggccttcatggcctagccagtcttcagttataaccactccaccctcctcactttctctctctctctctctttttttttttttttttttttgctatgggatttaatgggaaaaatatgtaaaaactgtcactagtcagctggctctttttcctatgaaatctatcagtacctttctccatccgttgttctcaataatgaccacagagcctgagtataccaagaaaaccaatattcgcattacaggtcactcgag

SEQ ID NO: 339 - DNA (cDNA), 183 bp; double-stranded, linear
gaattcggccaaagaggcctagccttctgcaagatgcttctgattctgctgtcagtggccctgctggccttcagctcagctcaggacttagatgaagatgtcagccaagaagacgttcccttggtaatatcagatggaggagactctgagcagttcatagatgaggagcgtcagggaccacct

SEQ ID NO: 340 - DNA (cDNA), 264 bp; double-stranded, linear
gaattcggccttcatggcctagttttaactgagtgcaacaagtattttcgttaagagattttttttcgtaatttaccattctgctgaatcaatttttaatccagttggaagctctaaaattctaacataattcagaagcattaaaaaagaagactaaggaagagaaagctacatttttatttcagcttgtattgcattgtgcagaaaggaaaatagtctagctaatttacttttcctatgaaaaaccttagaaggctcctcgag

SEQ ID NO: 341 - DNA (cDNA), 412 bp; double-stranded, linear
gaattcggccttcatggcctagcctttctagtcttccctcttctgtaggaatancatgttcctcaaatggtcctgaactttttcaccattttggtgaacccttttaaagtaaatttactcaatgctttaaaattcatagtcttaaaataaatgtgaattttgtttccaggtatttattctggggtacaaaaacttcccagaatttacagtaggaaaggaaacccctttatgatgtggcttattattacaagcattcagaaatgatgctggctaagtcaaatcattccttgagacagtgattcctaaatgtaatgccgccttcctgaactctcacatattctatatcatggttattttaaaaaatatatttttagccttttgtaaccttagtcttgttttgagcaatctcgag

SEQ ID NO: 342 - DNA (cDNA), 466 bp; double-stranded, linear
gaattcggccttcatggcctagggattataggtgtgagccaccgcgcccggccaggaatcatttttatccaggtaaggcatacagaaccggagggttcttgtctaagttgtaccatgaatgtgtgctcagtggctactttgaaatagacttactgtacaatccctgagcaggaatgaaaataaaagctggaaatcacgggttgctctggggttttcaggaaggtgtcgtccgtctggggtgagtgtcctcctttctcangggatttcatgtggcattattttgttttcatctgagaggcaacataagctgggagggaagggctgcaaagagggggccaggacaaatgtgtacctgggggcccccattttgactccaccctgagctggggctgggccacaggagggcagagggaacactttgggacggggagggagcccctggactgaaagaatggggtgactcgag

SEQ ID NO: 343 - DNA (cDNA), 328 bp; double-stranded, linear
gaattcggccttcatggcctagaattttggagtctttatcataggtaacctggaccacagttactatttattgacaatgtgattgagtgtatggaggaaagcacagtggatgctaggctttgtaaatatggggatgtagaaaagcagatagttcagtgtctacctttttctagaactaccttgaaccttaaattttaagtcatgttcattgctagaaaattaaatgtacttattaaaaccaatgaaaaagcacatttctgaaatgaagttagagataatctctgtgtcttataaaaagacattaataaaaatctggtaaggactcgag

SEQ ID NO: 344 - DNA (cDNA), 416 bp; double-stranded, linear
gaattcggccttcatggcctagtgaccagacataagaactcatttttagttaaagcattttaaaaaagtatacaaggcagagttgcaaacaatctcagcctatgaaaaggacagctgcagtcaatgttcccactaatattttccatccgtgtactgagtgaatttgtaatgtgcaactcatgtcaagaaaataaacagatgtgcaccacaagcggaacaacaatgaaagaacttacatagatttttattaagattgaacttttgatgttgattccactggtaagagagcactgtaggcaaaggtcttgtatttataaagttatctcctattgaggaagatgaagatgtcaatactccccaacagaatgctttgagctctttctagtagatctgtgccaactctgaaacacctcgag

SEQ ID NO: 345 - DNA (cDNA), 344 bp; double-stranded, linear
gaattcggccttcatggcctagtaaatacaaaatacaaaaatactggtgagagaatgggatgatgattatattcctggttcagtttttcttcctgagaaatttgataatacatcttttgatttttaataagtgaaataactggtgactgtgttgtatgtgtgtgtgtgtgtttttttttttttttttaaatagaagtgtgaaaagaaacttcatccacggaaacttcaggataattttgaaacaggcaagtcatttcctatctttttataatctctgccttgtgggatttggtttggtttacctaactttgattttagtgggagtatgtgagctgtgactcgag

SEQ ID NO: 346 - DNA (cDNA), 544 bp; double-stranded, linear
gaattcggccttcatggcctagccttcggaaccccaccagagtcacagccaggaagggcagcggggcgcaccaggccgaaggctcacgccacagggagggcagctaggacatggggggaagcgcgttaaaccagggagtcctggaaggggacgacgcccccggccagtccctgtacgagcggttaagtcagaggatgctggacatctcgggggaccggggcgtgctgaaggacgtcatccgagaaggagctggagacctagtggcgcctgatgcttcggtgctagatgcttcgtcttgggtaaactcctcgactcccaaggccccagctccatctttacctcagagcctcctgaacctcctcctccagcctcaccttcctccagcctcaccactcctccctggacctgcagctccgcacccccgggggcctcagaactaccccttccagggcctcagaactacccctacggtttctcctgcgtaaccttctgcctaccttcctgagagtggttggtgacagcagccggggctagaaacctcgag

SEQ ID NO: 347 - DNA (cDNA), 570 bp; double-stranded, linear
gccttcatggcctacccagtgattgtcaccatggccagcaagaggaaatccaccacaccatgcatgatcccagtgaagactgtggtgttgcaagatgccagcatggaggcccagcccgctgagaccttgcctgaaggaccccagcaggatctgcccccagaagcatctgctgccagcagtgaggcagcacagaaccccagcagtactgatggctctacactggccaatgggcatcggagcactttagatggctatttatattcctgtaaatactgcgatttcagatcccatgacatgacccaatttgtgggacatatgaactcagagcacacagactttaataaagacccaacctttgtatgcagtgggtgcagttttctggcaaaaacccctgaggggctttccttgcacaatgccacatgtcactccggggaagccagctttgtgtggaacgtggccaagccagacaatcatgtggttgtggagcagagcatccctgagagcaccagcactcctgacctagcgggtgagcccagtgctgaaggggctgatggacaggcagagctcgag

SEQ ID NO: 348 - DNA (cDNA), 300 bp; double-stranded, linear
gaattcggccttcatggcctagaaaaaagttttcaaagggaagtaatcttaaatctgtatactattttctatgatggaaattctgtgaagaaacaataacaaattctccctgactcctgtctgtcctaatagtaaggtggtctttcttctaatctccccatccatccacccatcaggaagcaacagggtaccttgtgtgagtaactgtagatttctgacttcttctcgcaccttcagctggagcacctgttgtaagatgtgctgccggaggttctcctgggcaatccccattcgctcgag

SEQ ID NO: 349 - DNA (cDNA), 424 bp; double-stranded, linear
gaattcgcccttcatggcctaacaaccaccaccacctggacgcccagcagcacaaccaccatagccggcctcagggtcacagaaagcaaagggcactcagaatcatggcacctaagtctggacactgccatcagggttgcattggctgtcgctgtgctcaaaactgtcattttgggactgctgtgcctcctcctgtggtggaggagaaggaaaggtagcagggcgccaagcagtgacttctgaccaacagagtgtggggagaagggatgtgtattagccccggaggacgtgatgtgagacccgcttgtgagtcctccacactcgttccccattggcaagatacatggagagcaccctgaggacctttaaaaggcaaagccgcaaggcagaaggaggctgggtccctgaatcaccgacgctcgag

SEQ ID NO: 350 - DNA (cDNA), 445 bp; double-stranded, linear
gaattcggccttcatggcctaattagattattttgagcttgggaacacttgtacatggttccccgggacataaatgtagaagttctgtagagcagtatcttcacattgagggatgtgaaggctttgcagagtatagatagtttaatgtaatttagagttcttcattatctttcctaggatcagatatctgccgatgatgacttctaacccattcagaatctttctatggtatattgccctggggtgtaaaatcctccaggaccctaaacagatggacagttgatgcatttcagggtaagctgtagacaacaatatatttgacccctgaaacaattcagtatgcttgtcatttgttaactagagttatttcaaacataattttgaataaaaaataaattttaataaatacatgttcccaattatgcatataaaagcaatcctcgag

SEQ ID NO: 351 - DNA (cDNA), 278 bp; double-stranded, linear
aattcggttcatggcctaattttggaactaagagacagattttttgtttttgtttttttaaatagctgttaactagtctcataaggacaaaatacagaaagacagttcttacagagaaatagaagcaaaaaaaggaaccaatggaaaatttaaaactgaaaaatagaatatctgaaataaaaaattcactagatgacataactgttgaggaaagagtatgtgaatttgaagaaagagcaatagaaatgttccattgtaaagaacaaagagaactcgag

SEQ ID NO: 352 - DNA (cDNA), 457 bp; double-stranded, linear
gaattcgccttcatggcctacagattatcttacactgaactgatcaagtactttgaaaatgacttcgaaatttatcttggtgtccttcatacttgctgcactgagtctttcaaccaccttttctctccaaccagaccagcaaaaggttctactagtttcttttgatggattccgttgggattacttatataaagttccaacgccccattttcattatattatgaaatatggtgttcacgtgaagcaagttactaatgtttttattacaaaaacctaccctaaccattatactttggtaactggcctctttgcagagaatcatgggattgttgcaaatgatatgtttgatcctattcggaacaaatctttctccttggatcacatgaatatttatgattccaagttttgggaagaagcgacaccaatatggatcacaaaccagatggcaggactcgag

SEQ ID NO: 353 - DNA (cDNA), 295 bp; double-stranded, linear
gaattcggccttatggcctagcaggcgccaaggtaacatgaacaaacagctgcttgctgcccccaagctttagtttctagtgggcctggagcaattgtgaaggacaactccacccaaggcccagtattgaagaggggtagggtgggaggattgtacatatcgcgaacgcttggcaaatctctagattttttttcctcctaggaaataataatttttaaaaaggcttgtaaaaaataataaaatgtttcatgacagcagcagatgtaaaactcccagtactccgggcgacctcgag

SEQ ID NO: 354 - DNA (cDNA), 414 bp; double-stranded, linear
gcctagacatgatggtggccacgtgccaggggaccacaccctatgtacaaagcaggagaatgatgctcccagctgagctgcaggatgggcgctgggctgactggaggggtagacggggtggggtctgaccccattagcctttccccatccaacctgggcccccataagccattctctggccctctgcacaagacagactcagcaaatctgcgaggtatggggattctgccaactccccacctcgcctcaccttccctaggtctgcgcgttaggagattctggagccagagggagagaccccagaaactccccggtcggcgacccagcccgagacgcctggggtcccaagggaagctgaacgcccgcagaatggggaaatggagagagaacctgaaagagcccctgtaactcgag

SEQ ID NO: 355 - DNA (cDNA), 443 bp; double-stranded, linear
gaattcggccatcatggcctactcccgagtagctgggactacaggcatgtgccaccacgcccagctaattttttgtattttttttagtagagatggggttccaccatgttagctaggatgatttcgatttcctgaccttgtgatccgcccgcctcggcctcccaaaatgctgggattataggtgtgagccaccacgtggcctcatttcattctttcatgtggataggcagttgttccagaagtatatagtgaggagcttcttctttctctaatgatctgcaatgtcaccttcatcatttatgaaggttgcacatatacatgggaattttttagtctggcattaaatgttcttcaaaagagttcctgcaaacgtttttgtttttatttcctactgttcccttcacgtactctctactgaactaaactctctaatgtgtctcgag

SEQ ID NO: 356 - DNA (cDNA), 286 bp; double-stranded, linear
gcgattgaattctagacctgcctcgagctcaagagcagcccacctgttcagtattcatacccacatatccataatagagctcttctcttcccccgggttcctctgcctcagccttttcctcttagcagatgccatctgcagggccacttggctgcccgtagcagtaaccgcacagtcttccacatttactccctcagcctcagctgctcctgcagcccaggcactgtctctgtctctgcattgctcaagcctccaccatctcggttacaccccacagccactcgag

SEQ ID NO: 357 - DNA (cDNA), 269 bp; double-stranded, linear
gaattcggccttcatggcctactgccttagcctcccaaagtgctgggattacaggcgtgagccaccatgcccagccctatagtagttcttcttttgccccttaatatcctcacccacatgtcctgtaccctgcctgaaccctcctcctctttttgttctgatctttgagctccctagagcccataattctttagagcaggtatgtcccgagtctgaaacatgcccttatttgtcccaagctctggacatttctcaccccatctctcgag

SEQ ID NO: 358 - DNA (cDNA), 250 bp; double-stranded, linear
gaattcggccttcatggcctaccaaggaagcctttctgtttttggcccaaggagcgtcaataagatctttgaaaatactttgaagtcattttgtgtgtgtgtatgtgcatacacacctgatttgttttattttttatttttattttttgagttagggtctggctctgtcgtccaggctagagtgcagtggtgtggtctcagctcactgcaacctctgcctcccaggctcaagccgcccccccacctcgag

SEQ ID NO: 359 - DNA (cDNA), 258 bp; double-stranded, linear
gaattcggccttcatggcctaatgggagattggtgggagtagggaacacaaaaggcatgggaaaagaagataggttgtattttggtcatactgacaccaacatgcctaaaggatagccctgtgaaaaaagctagcagacagttgaactgcggctgtgaaacaggaagccgtgagggctagactcatcgttgtagtcattcgtaaagagtaaatacttggagctattgtagtagatggtatcaccacggaacactcgag

SEQ ID NO: 360 - DNA (cDNA), 259 bp; double-stranded, linear
gaattcggccttcatggcctaggaagccacaggtcggctctgcattagcaggagcagccgccctcgctggccgggggctcctggggtttgtccagcttgatgtcgatcatcccttctttgcttttctcctggacattctccattccgggtagagccgacgccacacgtcgaaaaagctgcttcacgttgtagccagtcttcgcactggtctcaatgaacatgacgctcagttctttggcgcgctgccccccccctcgag

SEQ ID NO: 361 - DNA (cDNA), 422 bp; double-stranded, linear
gaattcggccttcatggcctaaagattagcctgggtaacatagtgagaccctgtctctattaaaaaataataataaaaataacattcacattggtattgttcactaaggtattggttgttaaggcattcattaaggtattgttaaaacttgtgttaagcatgttaaagtctcagtaactttgggatagaaataaaatgtgataaaaagctgaaagaaaccaccacaagggagagtcctttttgaaatattagagacataatgctgtctaataaaaaacgacatcaaagaaaaactacactacagtgactgcagacttaatgttggccaaccatgcatcctccctagaaatgcatttgaatttgatttactaatcttttatttaggaaatttacatttttacattagtgagattggcctcgag

SEQ ID NO: 362 - DNA (cDNA), 288 bp; double-stranded, linear
gaattcggccttcatggcctagttattcttctaatagctcagctacttttccttaaaatatctttttctctgcaaagccttcatataattgttgttattataacagtgatgatgactgccactcattacaactgctgttgttaatctttgttgttattttaaaccatatgttatttaaaccataaactgcatcataaaagcagtttctttctaatccatgatgacacctgctagccaggtatcgtatcaattcttcacaggtctattgaattctagacctgcctcgag

SEQ ID NO: 363 - DNA (cDNA), 264 bp; double-stranded, linear
aaaaatttcaacaaatcctgaagtctttctgtgaagtgaccagttctgaactttgaagataaataattgctgtaaattccttttgattttctttttccaggttcatggtccttggtaatttcattcatggaaaaaaatcttattataataacaacaaagatttgtatatttttgactttatatttcctgagctctcctgactttgtgaaaaagggtgatgaaaatgcattccgaatctgtgagggcccaaaacagagactcgag

SEQ ID NO: 364 - DNA (cDNA), 260 bp; double-stranded, linear
gaattcggccttcatggcctagaccctcatcaatagatggagacatacagaaatagtcaaaccacatctacaaaatgccagtatcaggcggcggcttcgaagccaaagtgatgtttggatgtaaagtgaaatattagttggcggatgaagcagatagtgaggaaagttgagccaataatgacgtgaagtccgtggaagcctgtggctacaaaaaatgttgagccgtagatgccgtcggaaatggtgaagggagactcgag

SEQ ID NO: 365 - DNA (cDNA), 332 bp; double-stranded, linear
gcgcctatcacaagcagatcatgggtggcttcaaggagacgaaggaggctgaagatggcttccgcaaggcccagaagccttgggccaagaagatgaaggagctggaggcagccaagaaggcctaccatttggcttgcaaagaggaaaagctggccatgacacgggagatgaacagcaagacggagcaatcggtcacacctgagcagcaaaagaagctgcaggacaaagtggacaagtgcaagcaggatgtgcagaagacacaggagaagtatgagaaagtgctggaagatgtgggcaagaccacaccccagtacatggagaacaaactcgag

SEQ ID NO: 366 - DNA (cDNA), 330 bp; double-stranded, linear
gaattaacagagttttcagaattagaatactcagaaatgggatcatcgttcagtgtctctccaaaagcagaatctgccgtaatagtagcaaatcctagggaagaaataatcgtgaaaaataaagatgaagaagagaagttagttagtaataacatccttcataatcaacaagagttacctacagctcttactaaattggttaaagaggttgaagttgtgtcttcagaaaaagcaaaagacagttttaatgaaaagagagttgcagtggaagctcctatgagggaggaatatgcagacttcaaaccatttgagcgagtatgggatctcgag

SEQ ID NO: 367 - DNA (cDNA), 200 bp; double-stranded, linear
gcgattgaattctagacctgcctcgagtacggagcgaaactctgtctcaaaaaaaaaaaaaaaaaaaaaaaccgagtataaaaggcatttttttcctttaaactaagtaaaatataatgttgaatagttctattttgcttaacgggcttttgttatttgttttgtgtagaaattggcatttttcacatagaaatctcgag

SEQ ID NO: 368 - DNA (cDNA), 368 bp; double-stranded, linear
gaattcggccttcatggcctagagaaatgaggaaaaagaaggaagaatatttaacttttagtcctcttacagttgtaatatttgtggtcatctgctgtgttatgatggtcttactttatttcttctacaaatggttggtttatgttatgatagcaattttctgcatagcatcagcaatgagtctgtacaactgtcttgctgcactaattcataagataccatatggacaatgcacgattgcatgtcgtggcaaaaacatggaagtgagacttatttttctctctggactgtgcatagcagtagctgttgtttgggctgtgtttcgaaatgaagacaggtgggcttggattttacaggatattctcgag

SEQ ID NO: 369 - DNA (cDNA), 299 bp; double-stranded, linear
gaattcggccttcatggcctacattcggagaagttgaaagaattacacccagaacacccatgtctaccatgttactacatttgtgtgtgtgtgtgtgtgtgtgtgtgtgtgcgtgtgcaattttaattacaatggtcgaggaagctcttgctgagaaggtgatgttgaataaagactctaaagaccctaaagagttgagagagagctgtgtggagttctggggcccaggcacagcaagtacaaagatcctgaagcaggagcattcttggtgtgttcaaggaaagcaggacaacctcgag

SEQ ID NO: 370 - DNA (cDNA), 289 bp; double-stranded, linear
gaattcggccttcatggcctaccgcctttccattatgcaactgtggtggcttttcttttgttatacgacgattatttgtcaaccccactatctttgcactcaaccatgggccccctgggctcagagacctcgtgacagtcatcttctcatcaccacatctgcaaatgtgtgggtggatggggcagcaacagtccacctcctccaagaagcagtccctgatttttcctccccagacaaatcttcgtctctctgttcttggaaactcaaagaactaagcacctccctcgag

SEQ ID NO: 371 - DNA (cDNA), 540 bp; double-stranded, linear
aattcggccttcatggcctacaagctcgatcattatccttctgtgagttaccatctgccaagttcatccgacaccctcttcaattctcccaagtcgctctttctgggaaaagttatagaaacagggaaaattgaccaagagattcacaaatacaacaccccaggattcactggttgcctctccagagtccagttcaaccagatcgcccctctcaaggccgccttgaggcagacaaacgcctcggctcacgtccacatccagggcgagctggtggagtccaactgcggggcctcgccgctgaccctctcccccatgtcgtccgccaccgacccctggcacctggatcacctggattcagccagtgcggattttccatataatccaggacaaggccaagctataagaaatggagtcaacagaaactcggctatcattggaggcgtcattgctgtggtgattttcaccatcctgtgcaccctggtcttcctgatccggtacatgttccgccacaagggcacctaccataccaacgttctcgag

SEQ ID NO: 372 - DNA (cDNA), 527 bp; double-stranded, linear
tcgacccctggctaatgacaaactatgtgaccttcatggtgggggagattctgctcctcatcctgaccatctgctccctggctgccatctttccccgggcctttcctaagaagcttgtggccttctcaacttggattgaccggacccgctgggccaggaacacctgggccatgctcgccatcttcatcctggtgatggcaaatgtcgtggacatgctcagctgtctccagtactacacgggacccagcaatgcaacggcagggatggaaacggagggcagctgcctggagaaccccaagtattacaactatgtggccgtgctgtccctcatcgccaccatcatgctggtgcaggtcagccacatggtgaagctcacgctcatgctgctcgtcgcaggcgccgtggccaccatcaacctctatgcctggcgtcccgtctttgatgaatacgaccacaagcgttttcgggagcacgacttacctatggtggccttagagcagatgcaaggattcaacccagggctcgag

SEQ ID NO: 373 - DNA (cDNA), 407 bp; double-stranded, linear
ggcaagaaaggatgtccgcacagctggctgctgctgagagcagacaaaagaagctggaaatggagaagcttcagctacaagcccttgagcaagagcacaagaagctggctgcccgccttgaggaagagcgtggcaagaacaagcaggtggtcctgatgctggtcaaagagtgcaagcagctctcaggcaaagtcatagaggaggcccagaagctcgaagacgtaatggccaaactggaagaggaaaagaaaaagacgaatgaattagaagaggaactctccgctgagaaacgaagaagcacagaaatggaagctcagatggaaaaacaactctctgagtttgacactgagcgggaacagcttcgtgccaagctgaaccgggaagaagcacacaccacaaacctcgag

SEQ ID NO: 374 - DNA (cDNA), 322 bp; double-stranded, linear
gaattcggccttcatggcctactctgttttctccctggacttatgtgcttcgtctggaatgttacatctcttcctctctttctttttttttggtccccatgttgactgttttattggggtttctggatatctcggggccacctcacaggaagcggtttgcaatgagatcataaacattgccgaaaaatctgttcattactgcagcactgtttctcatccccttgactttcatcacaaggtatccccttctgacaataaatcatctttaatcatttctcagcaacctcaagcccagcagcgaagagtcaccccctatctcgag

SEQ ID NO: 375 - DNA (cDNA), 480 bp; double-stranded, linear
gaattcggccaaagaggcctacctaaaccgtcgattgaattctagacctgccccaaaaccaacaaggagaacaagctcagtcttctgtgtcttaatttttggctttactcttagccctgccccatttcctaggctctccacagtccagccgctttgagctacttttccttccctgatatgtgcagctctctcacctctgagcctccgcacctgctgttccacagcactctccgcattgccttctcccactgtggctcactgctgagctgtgttcaggccctttgggaaaccctctctttcactccttttccctggtctggcttgggagcccatgcttacccctgtcaggacaccttgaaacccagcagtgaaaacatgacacttccttgtctggctgattttcttagtgaagcgagtaggagtttcctttgtcaggacttcagcaagcaaaattcaggagaggtcataaaatgtctcgag

SEQ ID NO: 376 - DNA (cDNA), 283 bp; double-stranded, linear
gaattctagacctgcctcgagtaaccagagagtcttgtcaacattaacactagcagtatttccaacactttatttttttaacttcctttattatacagaagcaggatctatgttttttactctttttgcgtatttgatgtgtctttatggaaatcataaaacttcagccttccttggattttgtggcttcatgtttcggcaaacaaatatcatctgggctgtcttctgtgcaggaaatgtcattgcacaaaagttaacggaggcttgggaaactgagctcgag

SEQ ID NO: 377 - DNA (cDNA), 324 bp; double-stranded, linear
gaattcggccttcatggcctaaacagcaaagaacaactcatcaccgctcacgttcagtatctcctcatcgcggcaatgatcagggaaagccgcgttcacgtttaccaaatgtgccattacagaggagtttagatgaaattcatccaacaagaaggtcacgttctccaaccagacaccatgatgcctcccgaagtccagttgatcatagaaccagagatgtggatagtcagtatttatcagaacaagacagtgagcttcttatgctgcccagagcaaaacgaggacgaagtgcagaatgcctacatactaccagaatgtctcgag

SEQ ID NO: 378 - DNA (cDNA), 352 bp; double-stranded, linear
gaattcggccttcatggcctactgaaatttcaataaaaccagcttgaaagttccattactagaaagataagagtggtcagaaaacattttttattaacctatttcatctagtaagagtatcttaaatgttttttctcttgagtactgaatacacatgcaggacaatggacctaaatacagttaacttttgtttttcactcctttgcttttgcattgtcaatagtccggtaaggtttaggttctatcagaagtactcagacatgcagtgggcaatcgataatttctacctgggccctggatgcttggacaactgcaggggccatggagattgcttaagggaacagtactcgag

SEQ ID NO: 379 - DNA (cDNA), 271 bp; double-stranded, linear
gaattcggccttcatggcctagtctgtgtgtagtggaaactctattgcctgccctgcacatctgctccttttcttctctgcactctgggacagcttctaaagtttgtccaacatgtcattgactgagttttgtatcatttcagttctgctctttactggttcctatgtggatgctaattatgcaaatgcattttccacctcttgcactcctttttctaagtcacctcacttctcatttcctcatgtttttccnttatcctcttctctcgag

SEQ ID NO: 380 - DNA (cDNA), 371 bp; double-stranded, linear
gaattcggccttcatggcctaacgcggccaggcgattcggtgaagcgattcctgcaggcgttggttcccctctttgacctggtacaaagaattttacgtgaaagattttgtcgtcagagtccacatagtaacctatttggagtgcaagtacaatacaaacacttaagtgagctgctgaaaagaactgctctccatggagagagtaactctgtccttattatcggaccccgaggatcaggaaaaactatgttaataaatcatgctttgaaagaactcatggaaatagaagaagtgagtgaaaatgtattacaagttcacttaaatggactgctgcagatcaatgacaaaatcgccctaaaggaagtctcgag

SEQ ID NO: 381 - DNA (cDNA), 277 bp; double-stranded, linear
gcagagttaagcaaattaattatagctatctttaagctataaatgtgttaacatgtatatataccatttattatgttctactttagtgatataccttaatttagtgggctttggcagggcgggggagggggaacgttcattaatctctgaggaaaacaaaacctgttttctacttgagtctaacatatggtcccaatttattaatacttctgttaaatttgatgtcaggtcaacatttttcagaaatgtatttattctcagaaacagaacactcgag

SEQ ID NO: 382 - DNA (cDNA), 290 bp; double-stranded, linear
gaattcggccttcatggcctagttgttactggagttaaagagagaactgagaaagacaaaggagtagaacgtttactcaaataagtaataacagaaaactttccaaaccagaatatacaggtacaggaaggtcaagggtcaccaatccgagttaactcagacaagaatactccaatttacaaactcataagggtcaaagacaaagagagaatttagaaaacagcaggagaatagaagcaaataacatataagatagatccaatatgcttggtagcagatttctcagcagg

SEQ ID NO: 383 - DNA (cDNA), 241 bp; double-stranded, linear
gagagtgtggagagggtacatttcccttgtatnctatgttcttctttctagtgggtctcatgtagagatagagatatttttttgttttagagattccaaagtatatatttttagtgtaagaaatgtaccctctccacactccatgatgtaaatagaaccaggaataaatgtgtcnttgtgataatcccatagcaatttatggtaagaacaagacccctttccctcaccaccgagtctcgag

SEQ ID NO: 384 - DNA (cDNA), 299 bp; double-stranded, linear
gaattcggccttcatggcctagaaacacaataaagccccacaacagcaaactttttaaacgacgaaagagagctctaaataacagcaaaatgctgctcttcttgctcccattatgtttactattactgtgctctagtgagaatagcaaggggtcaaaggaatttataacacttcctataccttcaacttaccaagtcccctaccaagtaacagttttctgtcagagagaaagttctgccctccctgctcaaaggtgtccatgccaactagacttcccctgtagctacctgggtctcgag

SEQ ID NO: 385 - DNA (cDNA), 546 bp; double-stranded, linear
gaattcggccttcatggcctagaaagaggtggcagaaggaatggtaggaaggggaggatgtaagcgatatcatcaagtcagaatcatgagttcttggtgcccggatgttagaggagggaaaaggtgaagatggctgaagctgtacactttcatgatggtggaatggaggggtcccttgggaattaggggtgtctctaggaagaaccagcttagggtacattgagaaagaggagacaggctaggcaggtctagaattcaatcgcagatcacagctacaaggaccaggcctttgatactctgagcctcgatagctctgatagcatggagaccagcatctctgcttgctcaccagacaacatctctagtgccagcacttcaaatattgctagaatagaagaaatggagagacttttgaagcaggctcatgcagaaaagacgcggctgctcgaatccagggaacgggaaatggaagccaaaaaacgagccctggaagaagaaaaacgacgccgggaaatcctggaaaaacgattacagggatagctcgag

SEQ ID NO: 386 - DNA (cDNA), 317 bp; double-stranded, linear
gttaggatcatacatcataggtgtatgtttaactgttcaagaaactgccaaactgtttcccaaagtggttgtattgttttacatttccacgagcagtgtttgagagctccagttcttgcacatcctagccacaaaaaggttctgttttttaaagacaattttttttttctttgagagtttcgccctagtcgcccaggctggagtgcagtggtaagcgaatccctgctacaggccagagactgttctcagttggtttttacaccaagtatcgcacttcattctaacactccaccattttacaaatgagatttctcgag

SEQ ID NO: 387 - DNA (cDNA), 234 bp; double-stranded, linear
gaattcggccttcatggcctaggtcaggttagtcagctaatggataagagacttgaaattactcttttgggattagcaaatagaagggaaaaacatgataagggcacagagcggtgggtctgggggaaaaagcagaggcacagtttgaaaaaaatgtgtaagagactgactaggtaagatatggtcacagttcataagtcctttgaattctaggattaaaaaggtgaactcgag

SEQ ID NO: 388 - DNA (cDNA), 294 bp; double-stranded, linear
gaattcggccttcatggcctactagataagtgtcaattccatctgcttctgatttcccacgtcactgccctggtccacacactgtgatcttctgcccccatctgagtgccgcatactcagccttgtccctgcatcagaccccggcccagcacagtaacgagaatgggcttcctaaacacaaatctgatttgttccgccttccacttcctagtggcttcattctcgtgccctcactcagggccctcacacatgctgttccctgcacctccgacacccttcccagcgcccctcgag

SEQ ID NO: 389 - DNA (cDNA), 215 bp; double-stranded, linear
gaattcggccttcatggcctaagcaaagctaagtgtaaaactaaaaagcagtttgttgcaactggtcataaaagtgattaaatctaaagctggcattaataaggaagcaaggtaataaaacaaaaatataaacagctttgagaaagtacacctaataacaaaatcttgtaacacaacaaatgaaaatcacaaaaaatataaggagactcctcgag

SEQ ID NO: 390 - DNA (cDNA), 477 bp; double-stranded, linear
gaattcggccttcatggcctagaaaaacactatagtcacgcaagtaatgacccttcttatcctcaacccccagcatatatgcacaaggacaaacagtatacatacaatctcacctgagagacgtcctcagacttgtgttgaaaccttatcatgctgcattatctcccttacaacatccttcctgccttgtttctcattttcacactatacggagtaaaaaaatatacaatttctatatattatatatataacctccatatattttatactatttcatatttttatactatcagattaatgttttatattttatctatcattttaaatatgctatgtaaagcatctacaaaattggtcaccattcctatgggaagtatctgcagaactctagaaatgaattcatcttttgcttacccctccctttttgaggggacagggactttcttcttttccctcatcttcatcttccccctcgag

SEQ ID NO: 391 - DNA (cDNA), 247 bp; double-stranded, linear
gaattcggccttcatggcctagttagtcagagtgaaatattcaataatgagtggtgcagccttgggacttgagattgtttttgtcttttttctggcattatttctgcttcatcgatatggagactttaagaaacagcatagacttgtgattattggaacactgcttgcttggtatctctgctttcttattgtcttcatactgcctctggatgttagtacgacaatatacaaccggtgcaagctcgag

SEQ ID NO: 392 - DNA (cDNA), 366 bp; double-stranded, linear
gaattcggccaaagaggcctagtcatctgcatttattatgagcagcaggtgggacacttccagcaacagtaaaaaaaagtaatttacaaaagcaggtttcagtgaagccatctggttgttacccttgggtgctcacacgtagatgccaacccagagcagcaggaagaggactccaaagcccatgaagagtgaggccactaaggagatgaggagctctttatagatatcacgagtgtacttggtagaggtgacctcgtaaacgaagaaccaggcggtgaagaacatgccaatggccaaaagcaccacggtcagatgggggaagacagctgggttcactgggctggtatatctgctcatggcctcgag

SEQ ID NO: 393 - DNA (cDNA), 205 bp; double-stranded, linear
gaattcggccaaagaggcctaccctgggttaacattcaagatggtacatgctgaagccttttctcgtcctttgagtcggaatgaagttgttggtttaattttccgtttgacaatatttggtgcagtgacatactttactatcaaatggatggtagatgcaattgatccaaccagaaagcaaaaagtagaagctcaaaaactcgag

SEQ ID NO: 394 - DNA (cDNA), 387 bp; double-stranded, linear
gaattctagacctgcctcgagccggagatgganaagaaagtcagcctactcaaggacaatagctctctggaatttgactctgagatggtggagatggctcagaagttgggagctgctctccaggttggggaggcactggtctggaccaaaccagttaaagatcccaaatcaaagcaccagaccacttcaaccagcaaacctgccagtttccagcagcctctgggctctaatcaagctctaggacaggcaatgtcttcagcagctgcatacaggacgctcccctcaggtgctggaggaacatcccagttcacaaagcccccatctcttcctctggagccagagcctgcggtggaatcaagtccaactgaaacatcagaacttctcgag

SEQ ID NO: 395 - DNA (cDNA), 553 bp; double-stranded, linear
gaattcggccaaagaggcctatcgagaagccttgtttatttaatgtgagtttgtgcctttttgtctcaatcttccaatacaggtatattgagaaaaaaagcagtctaataaaatcctagacagaactttctggagtccagtttggtgatgtccattttccagctgtatgtatcctcaaacttgcactgataaccgccattttaccagggcaggattaggaagaggtacaaaggtgtgtctgaaaatttttgcacgtggatttctgcatataatagtcccgtgtcagtttacttatgcaaacattgcacatctgaattgtaattcggccgtttcctactgacaggatgtccttttgcttttgtctgcctcctcttcacatcttcctctttatccaccctgcagccggggggcgggggagaccggatcccaggcaggacagtggctaggctgcgtgtccccacccccgaccctcgtttgacccctgggagccggggcgaagacagcacaaggacggagccctcggatccctcacgagtggggcagaggctgcggg

SEQ ID NO: 396 - DNA (cDNA), 472 bp; double-stranded, linear
gaattcggccaaagaggcctacaaggttacttgaccaagatggtgacattgtaagatttgaacaaaggaaatgtgacttcagagtcatggttgttaactatgctatgaagtaggaaaactttatgaggtctttttaactcaaacagtcgagttttaagttgagggttagcaatgatgaatgagtggccaaaaaatgtattcatatttttagtctttcttagaattactggtagttgtgcacaactagagggtatttatttgtgtgtgtatgtgtcgtgtgtgtacgagtgctggaaatactctgccagtttacagtagaggcaggcttacataattcagtcatgaaagctgaggcttatagtttagaggggatcgtcctcttcttaatgagtctgtaagttacaaaaataacttttttctttatttactaactggttggtttttaatattaaaatattaggtgcttctcgag

SEQ ID NO: 397 - DNA (cDNA), 548 bp; double-stranded, linear
gaattcggccaaagaggcctagattgggggacattcttctttagaaggaaaagagtctaattagtggatattaagtaattaaataatacatactatcaaatattatgagagtcacatgaaccatgaagtcttcacttaatttaggagaaatggggaatattttctatcattcctgataacagaactagatatttcaagatcatagtcatggaatgtaatccataataccaaacagggtgctttactttgaagccattgaccattaaatttgattgttagtagcacaggctaccaaaaaatagcaaggaatatggtatccacacagatctcggctggcctcaagtaatcaaaagtgagaatgaaacatacatgacacaactggggacctctgggtttctgagacgtgggctacaagattatattaggtagaaaactaaaggaaatgtattccaagcaaaagtggcaagggaatttcacagaactaattttttaagggaggtaataaaagcagcagttaaaatgcatgtccatgtatcagattcctggag

SEQ ID NO: 398 - DNA (cDNA), 462 bp; double-stranded, linear
gaattcggccaaagaggcctaggctaaataccggcacgagaccgattttctgaagacagcagatttatcactgttaatccagcggaaaaaaacacctctggaatgataagccgccctgctccagggaggatggagtggatcatccctctgattgtggtatcagccttgaccttcgtgtgcctcatccacttctcaaactcggagaactgcaaggagctgcagctggagaagcacaagggcgagatcctgggcgtggtggtggtggagtcgggctggggctccatcctgcccacggtgatcctggccaacatgatgaatggcggcccggctgcccgctcggggaagctgagcatcggggaccagatcatgtccatcaatggcaccagcctggtggggctgcccctcgccacctgccaaggcatcatcaagggcctgaagaaccagacacaggtaaagctcgag

SEQ ID NO: 399 - DNA (cDNA), 428 bp; double-stranded, linear
gaattcggccaaagaggcctaggccgggcacacagaaaaatgcgaggaatagaaatgcttgcatactcttgatttttttttttttttttggtgtaaaaaacacaccctcccctcccaccccaaaaaacatcaaattccttccttttccccaaatccctggatcttggaatgaaagccacccttccccaatctgtcctcacctccttcagcccatccaagttatgcacaaaaaaacaaaaattagtgagaaatttggggatttgcacaacaaaaaattagataatgttttccaaaactaggtcttctatgctgtgtcaaaaaaagtttcctacagactgaggatattcacacgacaggagcctgggggttaaatgagcctttattagaatgttgtagcagttgtgtttgaaggcggtggccctacaaaa

SEQ ID NO: 400 - DNA (cDNA), 269 bp; double-stranded, linear
gaattcggccttcatggcctaagttgaaacttacgagtaacatacctggtgtctgattggttgtcatacttttcattttccctcctttcagatccaatccattctacacattatactgattttttcctagtgtactgatttctgttatgtcactttgctgcttaggcttcttaatgcttactgtatcaggtgtaaacaccttttgcttacctttccaggcctttttagagtcttatatagcttactcccatgctccaactcccctcgag

SEQ ID NO: 401 - DNA (cDNA), 236 bp; double-stranded, linear
gaattcggccttcatggcctaggcactttgaagagatatagaactccgtgtatcacattttccatttttatttcaatttttaattgcccagagcctaatttctgtgggcctctgctgatttgcacatttgagattcgtgtgtaaatatgcgtgtggcatgtgtacacgcctgggcctccttatcacaaagtgtgctctctcagtgtttaaatacacacaatccacatcgactcgag

SEQ ID NO: 402 - DNA (cDNA), 292 bp; double-stranded, linear
gaattaccttatacacatagcctgaaggtaattttatacaatatttccaatagttttgtgcttcaaacaaagtttgggtacattgaaccatcagaaaggaaaggtgtcattgtctcagccacccatgtggacaatctctggttgtttggcatcactgttgttgctgagtctgaatgtgaggaacatgccattggcatgtcttgcccacacacacaccattttgttatcttttgtgggtgtgcttatgtgggggaatctgggcgtgtgtgaaaaaaatatattgcagctcgag

SEQ ID NO: 403 - DNA (cDNA), 345 bp; double-stranded, linear
gaattcggccttcatggcctacttggggtactgagatacatggggccgaaaaggggtaatatggccatcttttatcagaaaaagtgacaaaacgggaatttaaaaaatgaattttccatctgactttatttccaaatacactttcttttttaaaaaaccaatacactttctttgaggatgacagtattaggaaatccaattatacaaaaaatactacatctagtctggggtagatatatttatttttggtaacatacattaagtggcactaattacacagtaactataaggtaactaacatgaaaccacagaactgtaactctgccacagctgcatgaactcgag

SEQ ID NO: 404 - DNA (cDNA), 252 bp; double-stranded, linear
gaattcggccttcatggcctaaaaaaaaaaaagccattaatctaattaattgtttaatcctgcttacaagattatcttgaaaaaatgtgctggggagtatggtataatgaattacgggtccaagaatttgggttcagataccaccttcagtctttactaagctgcgtgactttagcaaagtgcttagtctctctaagcttcggtttcctaatctatgaggagggcctaagatatcaccacccatcactcgag

SEQ ID NO: 405 - DNA (cDNA), 305 bp; double-stranded, linear
gaattcggccttcatggcctaagaatacgaaatttgagaggatgaatttgacctttaatattgttggactttgtattggatatctttcctccatcacttcaaaatcgtcttgcttggcctcttattgcaaccacagctgcagtagacagttccatacaagcttccaagaacttcatgggtacatctggagagcacctcacctggggccacattctctacctttcctgtcttactcttcctcctctgggcttctttctggtgcatgggggtggggggagatattaagtattccccaacagctcgag

SEQ ID NO: 406 - DNA (cDNA), 250 bp; double-stranded, linear
gaattcggccttcatggcctacacagcaacaaccaacatagctaatacagaaagcagtcagcagactctacagaattcccagtttcttttaacaaggttgaatgatcctaaaatgtctgaaacggagcgccagtccatggaaagcgagcgtgcagaccgcagcctgtttgtccaagagctccttctgtccactttagtgcgtgaagagagctcatcctcagatgaggatgatcggggggaggttctcgag

SEQ ID NO: 407 - DNA (cDNA), 481 bp; double-stranded, linear
gaattcggccttcatggcctaaaagaaactaggtgtgattggaaggaagaatcatgaaagatcagggtagatactggtggggcagctattaaaggagtttgagcaggggcatgacatcttcacattgaaagcaatatgggagtcgaattaaatttagtacccagttgagataaaagtccattgccatattcacagtgaggtgggacaaaagcagagtcagagagattaagaggctgggaaagattgaagtgatttttaggaatcagaatccacatcagttgatgacaagtacagaagggcacaatagcaagaagaagaagtaaatgataattcctagatgccattagtcacaatcaagtacggaagagacattattgactgaggttgaatcagggcagagaagataatatacctgattttggaagtgttgcatgtaagggggcttcgatttcagctacttacatacttgggaagtctcgag

SEQ ID NO: 408 - DNA (cDNA), 308 bp; double-stranded, linear
gaattcggcttcatggcctacccggcaattggctgatccgcagaaacatttctgggcttcttttccatatctctggaactgatagtcaaacgttaactctgagcctgaaggaaccagtttggtggtaaaaaacccaaccctcagttgtccgttcacagtccatttttgggtttcacaatttggttcacagctgtgattcatgaaacgagagcaatttcctttttgagtggcatctattatctcatcattcttcagggccatgaaatagtaatggatgtttttgtttcgtgcatactccttcactcgag

SEQ ID NO: 409 - DNA (cDNA), 337 bp; double-stranded, linear
gaattcggccttcatggcctacaatgaggataatacaaaagagcaatctgccccactgtgagcctgagcttcccatactgacttctctctctccagagggatccactcctaccagtctggaaagcactgggcatacaagcgcacaaatgcgtggcacatactacaaatccttctaaagccactgctgtacacctgcctcacttaaccatgcagcctcaaggctgtctcatgtcattctttcctacagctgcagagttttcaacatatggacaggtgtgccaggatttatttgactagtctcttactgatctagctcacctcctaaatacaactcgag

SEQ ID NO: 410 - DNA (cDNA), 315 bp; double-stranded, linear
gaattcggccttcatggcctaaaatgtggggattgggaaccactagttctttcagatggtattcttcagactatagaaggagcttccagttgaattcaccagtggacaaaatgaggaaaacaggtgaacaagctttttctgtatttacatacaaagtcagatcagttatgggacaatagtattgaatagatttcagctttatgctggagtaactggcatgtgagcaaactgtgttggcgtgggggtggaggggtgaggtgggcgctaagcctttttttaagatttttcaggtacccctcactaaaggcactcgag

SEQ ID NO: 411 - DNA (cDNA), 277 bp; double-stranded, linear
gaattcggccttcatggcctacctgaaccccttacttcgaaggatcataagattcacaggggtgtttgcatttggactttttgctactgacatttttgtaaacgccggacaagtggtcactgggcacttaacgccatacttcctgactgtgtgcaagccaaactacaccagtgcagactgccaagcgcaccaccagtttataaacaatgggaacatttgtactggggacctggaagtgatagaaaaggctcggagatcctttccctccaaactcgag

SEQ ID NO: 412 - DNA (cDNA), 316 bp; double-stranded, linear
gaattcggcctcatggcctagtggtagggctgaattcgcactatagggttagattttctactgtagggttagatttttttaatggtgtgtatataataatataatattaataataatcggagagggtcaaagaggagggaaactgggtaacccaaaaacataaggtcgaggtccctgttcttcaccggaaagagggtcaaggaccaaagccatagatttgactggtagtttagtttagtcctgtctacgaagaagaagagcggttgtttgttttaacagattcaagagcaggaagcactcatttagataactcgag

SEQ ID NO: 413 - DNA (cDNA), 249 bp; double-stranded, linear
gaattctagacctgcctcgagtcaggcttttaaaaacaatctcatctgtccctctaaaaattagcttcctttagaacctcttctccttggcaatatattagtgatactattgttatcttcacactaaagattcaaaactttagtttttgttttaggaaagttttttatttttacatttctttcatccttcataattacccagtcatcatgaactttgtagttatctatttcttcataggaatcctcgag

SEQ ID NO: 414 - DNA (cDNA), 350 bp; double-stranded, linear
gaattgatactagggaccgaagggaactaagagactccagagacatgcgggactcaagggagatgagagattatagcagagataccaaagagagccgtgatcccagagattctcggtccactcgtgatgcccatgactacagggaccgtgaaggtcgagatactcatcgaaaggaggatacatatccagaagaatcccggagttatggccgaaaccatttgagagaagaaagttctcgtacggaaataaggaatgagtccagaaatgagtctcgaagtgaaattagaaatgaccgaatgggccgaagtagggggagggttcctgagttacctgaaaagggtaggctcgag

SEQ ID NO: 415 - DNA (cDNA), 529 bp; double-stranded, linear
gaattcggccttcatggcgttaaaactgtgcctaacagaggtgtcctctgacttttcttctgcaagctccatgttttcacatcttccctttgactgtgtcctgctgctgctgctgctactacttacaaggtcctcagaagtggaatacagagcggaggtcggtcagaatgcctatctgccctgcttctacaccccagccgccccagggaacctcgtgcccgtctgctggggcaaaggagcctgtcctgtgtttgaatgtggcaacgtggtgctcaggactgatgaaagggatgtgaattattggacatccagatactggctaaatggggatttccgcaaaggagatgtgtccctgaccatagagaatgtgactctagcagacagtgggatctactgctgccggatccaaatcccaggcataatgaatgatgaaaaatttaacctgaagttggtcatcaaaccagccaaggtcacccctgcaccgactctgcagagagacttcactgcagcctttccaaggatgctcgag

SEQ ID NO: 416 - DNA (cDNA), 363 bp; double-stranded, linear
gaattcggccttcatggcctactgagcctagtaattcaaggctgcagtgagctgcgatcacatcactgcattcccgcctgggcaacagaagtagactccatctctaaaaagaaggaaagaaaaaaaggaagaaatatacagtaattttaaactgggagatgaaatgctaatttctagaagtccatttggttttgaagggtctcatgtcaaaaaaaaaaaaaagtaagtaaaataagacccatcctactgttttatatactaaaatagtaagttaattaaatgaaaatgaagtacatttgggctttcatttaccaatcctggaatgttgaaaagttgcccaaaagacatttagcaagactcgag

SEQ ID NO: 417 - DNA (cDNA), 129 bp; double-stranded, linear
gaattcggccttcatggcctacctgaaagcccatctcctccaacttgcagcgccggtagagctcgtagtgccggctgtgggtctgctcgcggaggtcttccatgttcacccggatcaacctgcctcgag

SEQ ID NO: 418 - DNA (cDNA), 284 bp; double-stranded, linear
gaattcggccttcatggcctaggaggtgggtatagggaacacttggggagaaatagtgaaatctgaatatagactgtgcattgtatcatttagtataaatgttgacttgcctgattttgttgttgaaggcactgtggttacacaagagaacgtctgtcttcctaagtgatgcatgccaaggtttgcaggggcatcctgtctgcaattactctcaaatagatcaaaataataataacgtgtgtgtgcatgatggagacagggaagaagaaaggaaagggctcgag

SEQ ID NO: 419 - DNA (cDNA), 292 bp; double-stranded, linear
gccagcacattgtggaacagaaaaatggcaaagaaagagtgcccatcctctggcatttcctgcagaaggaagcagagctgaggctggtaaagttcctgcctgagattttggccttgcaaagggatctagtgaagcagttccagaacgtccagcaagttgaatacagctccatcagaggcttcctcagcaagcacagctcagatgggttgaggcagctgcttcacaacaggatcacagtctttctgtccacatggaacaaactgaggagatcgcttgagacgaacagctcgag

SEQ ID NO: 420 - DNA (cDNA), 304 bp; double-stranded, linear
ggaaccaacagaacaacctgtgaggaagaacaaaatggcctctaatatctttgggacacctgaagaaaatcaagcttcttgggccaagtcagcaggtgccaagtctagtggtggcagggaagacttggagtcatctggactgcagagaaggaactcctctgaagcaagctccggagacttcttagatctgaagggagaaggtgatattcatgaaaatgtggacacagacttgccaggcagcctggggcagagtgaagagaagcccgtgcctgctgcgcctgtgcccagcccggtggcgctcgag

SEQ ID NO: 421 - DNA (cDNA), 256 bp; double-stranded, linear
taatttagattatacagaacttggcctgcagaaactgaaggagtctggaaagcagcacggctttgcctctttctctgattattattataagtggtcctcggcggattcctgtaacatgagtggattgattaccatcgtggtactccttgggatcgcctttgtagtctataagctgttcctgagtgacgggcagtattctcctccaccgtactctgagtatcctccattttcccaccgttaccagagacaactcgag

SEQ ID NO: 422 - DNA (cDNA), 216 bp; double-stranded, linear
gcgattgaaatggatcctccagctcttccaccaaagccacctaagccaatgacttcagcagttccaaatggaatgaaggacagttctgtttctcttcaggatgcagaatggtactggggggatatttcaagggaggaggtaaatgacaaattgcgggatatgccagatgggaccttcttggtccgagatgcctcaacaaaaatgcagagactcgag

SEQ ID NO: 423 - DNA (cDNA), 389 bp; double-stranded, linear
gaattcggccttcatggcctaaaattaatgagttgaacctgtgaccactgcattcaagaagagtcacccaagagagaggtggggagtcgaacagagctcctttactttctcccacagaggaaaaggtggaattctgggctggctttccctcaccagagggtatcccaaatctatgacaaaagaaaaatgccagtctcttttggaaagtagggaatgccctagtgatgctgtatgaagaagcaagcctccatcttccccggggaaatttgaaaccaagatggggtcctgtcaatgaccctctagcatttattgagtgcctattagacaggtggccttgggctttgaaatgcaatatcttatttaacttaattctgagaacgtatctcgag

SEQ ID NO: 424 - DNA (cDNA), 411 bp; double-stranded, linear
gcccgtgctgatgtctttgaaagaaggctataagaagtcctcaaaaatggtatttaaggctcccatcaaagaaaagaagagtgttgtggtcaacggaatagatttattagaaaatgtcccacccaggacagagaatgagctccttcgaatgttcttccggcagcaggatgagattcgacggttgaaagaggagctggcccagaaggacatccgcattcggcagctccagctggaactgaaaaacttgcgcaacagccccaagaactgttagctccccagctgggctgttttctaagccgatctctccgtcgtttctactcatcccttaacttctcccttaccagtgaccccagagacagagccaggacaggagtgggggccagcctgaggacccccgcctaccacctcgag

SEQ ID NO: 425 - DNA (cDNA), 691 bp; double-stranded, linear
ggtaccaacaggacaccccggtggccccccgctttgacgtcaatgccccggacctctacattccagcaatggctttcatcacctacgttttggtggctggtcttgcgctggggacccaggataggttctccccagacctcctggggctgcaagcgagctcagccctggcctggctgaccctggaggtgctggccatcctgctcagcctctatctggtcactgtcaacaccgacctcaccaccatcgacctggtggccttcttgggctacaaatatgtcgggatgattggcggggtcctcatgggcctgctcttcgggaagattggctactacctggtgctgggctggtgctgcgtggccatctttgtgttcatgatccggacgctgcggctgaagatcttggcagacgcagcagctgagggggtcccggtgcgtggggcccggaaccagctgcgcatgtacctgaccatggcggtggcggcggcgcagcctatgctcatgtactggctcaccttccacctggtgcggtgagcgcgcccgctgaacctcccgctgctgctgctgctgctgggggccactgtggccgccgaactnatctcctgcctgcaggccccaaggtccaccctgtctggccacaggcaccgcctccatcccatgtcccgcccagccccgcccccaacccaaggctcgag

SEQ ID NO: 426 - DNA (cDNA), 321 bp; double-stranded, linear
gcagaccatatatcgaaagttctttacttgtatcaaggtgagaaaaaattagaagagatattacctctgggaccaaacaaagctcttttttataaaggaatggcatcatatcttttaccaggacaaaaatctccatggtttttccaaaaacccaaaggtgtaataactttggacaaacaagtaatatccacgagttcagacgccgaatccagggaagaagttcccatgtgttcagatgctgaatccaggcaagaagttcccatgtgtacaggccctgaatccaggcgagaagttcccgtgtatacagattctgaactcgag

SEQ ID NO: 427 - DNA (cDNA), 190 bp; double-stranded, linear
gaattcggccttcatggcctatatactatcaaatgaaaatagcaagatgctaccatttatattaaaaagaggacaaaatattaatatattcatggttgcttgtctatgtggaatatttctggatatatacataagaagttacattggttacctatgggcaggttactactgggtggcaggtgggctcgag

SEQ ID NO: 428 - DNA (cDNA), 670 bp; double-stranded, linear
gaattcggccttcatggcctaggcaaagctggccctgacgcctgggtttcttggccccagctgcccagcaggtgcctcgattccctgcccttgtgacctcccaggaaacagaactgatctgggacactatgtcacctctcctctcatctggggtcagtcagggttcgggggctgcagcagccaagcgcatgagaggtgtttccttggccttccagaaggcccactgtggagccagcctccctatgggaggcagagcggcaaggacagggctttggaatcagccaggtcggctcctgggctgtggccgtggagaaacactgcccccaggatgacacaggcaagagcccctgaggcatgggaggcccagggaagaccatgggctgtaggggagagtgtggcaggtgacccaaaggcccaaagagggccgtggggcctgaggaggtcataatctcttctgagtgggggcaggtcgattcttgcacaaggtgggctcttcactgagccataagggacagggaggtatgggagagcgctgggggcccatccccctgtccacccagtgtccactggcctgtccttcagggagcagagcagagcaggtggtggacgggcccagtgctgggtgttttcaccaccatccccccatcccccatctaagtcgctcctcgag

SEQ ID NO: 429 - DNA (cDNA), 278 bp; double-stranded, linear
gtaaggattggcgattcctacagcgaatgatcaccgctccctgcatcctcttcctgttttatggctggcctggtttgttcctggagtccgcacggtggctgatagtgaagcggcagattgaggaggctcagtctgtgctgaggatcctggctgagcgaaaccggccccatgggcagatgctgggggaggaggcccaggaggccctgcaggacctggagaatacctgccctctccctgcaacatcctccttttcctttgcttccctccccaacctcgag

SEQ ID NO: 430 - DNA (cDNA), 299 bp; double-stranded, linear
gaattcggccttcatggcctaattgaattctagacctgcctctgttcatctttaaatgctgttttctctgttcaaaatgccctttcctaccttatctacttgtgccactgcatattcctaaggctcaactcagggtatcttccctcggaaaccttgtctgatcatcctggcccctctggcggacagtaatttctgcctctgtgctcccatcacctgagcacacctgtatggtgctgctgagcccgctgaattggcattatgggcacgtgcgtctcctccattccatggagctcctcgag

SEQ ID NO: 431 - DNA (cDNA), 350 bp; double-stranded, linear
gttacatgacactgttaatgattgcatttggcttgctgtgggggcatctcttgcggatcaaacccacgcagagcgtcttcatttccacgtgtctgtccttgtcaagcacacccctcgtgtccaggttcctcatgggcagtgctcggggtgacaaagaaggcgacattgactacagcaccgtgctcctcggcatgctggtgacgcaggacgtgcagctcgggctcttcatggccgtcatgccgactctcatacaggcgggcgccagtgcatcttctagcattgtcgtggaagttctccgaatcctggttttgattggtcagattcttttttcactagcggcggctctcgag

SEQ ID NO: 432 - DNA (cDNA), 305 bp; double-stranded, linear
gaattcggccttcatggcctaccaggttcttgctgccctgcgactccagtatctgcagggggattatactctgcacgctgccatcccacctctcgaagaggtttattccctgcagagactcaaggcccgcatcagccagtcaaccaaaaccttcaccccttgtgaacggctggagaagaggcggacgagcttcctagaggggaccctgaggcggagcttccggacaggatccgtggtccggcagaaggtcgaggaggagcagatgctggacatgtggattaaggaagaagtctcctctgctcgag

SEQ ID NO: 433 - DNA (cDNA), 273 bp; double-stranded, linear
gaattcggcctcatggcctactcctcagcccctcatcttgcctccacccagctgctccatttttgccacatcgtggcccgcagccccagagtcactgtccatgtcaccatcctcctcctcctttggaatcctctccgcacactgtggcccttgtctcagggcccacaagctgaactgtggcatagctctctcttcttctccaagaagactcagcagcctacattcccattcctggtatgtgccattgggttggatgtccccacttatctcgag

SEQ ID NO: 434 - DNA (cDNA), 324 bp; double-stranded, linear
cgagtgagcgggcgggacagtgcttgtgaaactgaacacaacaaaagtatggatatgggaaaccaacatccttctattagtaggcttcaggaaatccaaaaggaagtaaaaagtgtagaacagcaagttatcggcttcagtggtctgtcagatgacaagaattacaagaaactggagaggattctaacaaaacagctttttgaaatagactctgtagatactgaaggaaaaggagatattcagcaagctaggaagcgggcagcacaggagacagaacgtcttctcaaagagttggagcagaatgcaaactacccacacctcgag

SEQ ID NO: 435 - DNA (cDNA), 548 bp; double-stranded, linear
gaattcggccttcatggcctaaatgatcaaattttggcttacatattttgcaacagtggtataacacaaagaagtaagcaaatatggcagaagtgtggtggctttggcgtctacttttgaccatagtggtggccctgttattcgtggctcccggggttcctacacatccttcccgatggaagaaggggttggccaaaaaggtcagccagctgatgggttggaccaagaaagacagagtgataagaatgagtgacaccatgttctatcattttgtattagatgcaccaaaaaactattctgttattgtgatgcttactgctgctctccacgcgttcagttcatgtgtcatgtgcaaaggtgctgctgaagaatttcagatcttggcaaattcctatcaacgccctggtgcattcaccacaaaggtattttttgcaatggtggattatgatgaaagccctgaggtctttgaagcgctccaggtaacgtcagttccgagtttcttccacttttctgcccaatggaaatttacaacagatgacagtctcgag

SEQ ID NO: 436 - DNA (cDNA), 308 bp; double-stranded, linear
gaattcggccttcatggcctaaaatgaaattcagacaaaatcactggcaccaaaaatggtttattctgagctgtcttcactttgactatttggggggcttctctcaagtacagatgtgggttggggtcccctggagcaggcaggattggcagtaagagatattggccactcaagtctactgtgtgtgtgtgcctctggaagagtgaagaatggacttcaaaagtaacatcaaaaatctaactgccaccatcctggagacattttgcagggctttcctttcaagtctttcaagtacaggacatctcgag

SEQ ID NO: 437 - DNA (cDNA), 420 bp; double-stranded, linear
gaacagaagagatcccctcggcccccacgccatatgaccaaagtcacaccaggttcagagctgcccactcccaatggaaccaccttatcatctaacctcactggtggcatgcccttcattgatgtgcccactcccatctcctctgcaagttcagaagctgcctcagcagtggtcagtccctctacagacagtggcctggaattctcctcccaaaccacttccaaggaagaccttactgatctagagcaacctggctctccagggtacagcacagctacagagcctggaagcagtgagctaggtgttcccgagcagcctgacctccaggaagggacccatgtggaaaagtcccagtcagcatctgtggagtccatccctgaagtgttagaggagtgcacgtcccctgccgaccaactcgag

SEQ ID NO: 438 - DNA (cDNA), 279 bp; double-stranded, linear
gaattcggccttcatggcctaattgaattctagacctgcttctcactgcacctggatggcaacgtgctggaccacttctcggagctgcgcagcgtcgaggggctgcaggagggctctgtgctgcgtgtggtggaagagccgtacacggtgcgtgaggcccgcatccacgtgcgccatgtccgagacctgctcaagagcctggacccatccgatgccttcaacggggttgactgcaactccttgtccttcctgagtgtcttcaccgacggcgacctcgag

SEQ ID NO: 439 - DNA (cDNA), 351 bp; double-stranded, linear
gaattcggccttcatggcctaattgaattctagacctgcacccagccttcttcttttcattataacctttataccacagtaagctgttgcatcattcaaatgactctgcatcctatattgaatattctccattattctctaatatctttgggggtacccaggattacagggttctgggcatacatgttaatgcttttgccaggacttttctttttattcattgtcgtgacccattgtctttgcttatatttaaagtttttgctcttgatatcattggttctttcctaagtcactttttctggtaactgctttggaatgaatcatacatatctcacttacggagctctcgag

SEQ ID NO: 440 - DNA (cDNA), 412 bp; double-stranded, linear
gaattcggccttcatggcctaccaatactcataattaaaagtttttcgttgtcaaaacattttcacagttcaggaatcacagtcctatttcatcttttgaaataaaagttaaagtccatttttcttaagccttattataccattatccaaaaacactacctagcattcatcttagtttttcatatctccttagcagatagtttagtatattccatttgtcttatttgaggtttaaaaaaagttgtggaagaagtttctcaggagttcagcaagcctttccatctatcttctattttaaaagaatgtgatttattgtttttatgaataaaatatacctcgtgtgtttctcatatgatgttccattacattaatcatccattaagtaaatgtttttgtgctgcaaaaactcgag

SEQ ID NO: 441 - DNA (cDNA), 292 bp; double-stranded, linear
gaattcggccttcatgcctagccaggaggaggaggaccctatgaacaaactcaagggccagaagatcgtgtcctgccgcatctgcaagggcgaccactggaccacccgctgcccctacaaggatacgctggggcccatgcagaaggagctggccgagcagctgggcctgtctactggcgagaaggagaagctgccgggagagctagagccggtgcaggccacgcagaacaagacagggaagtatgtgccgccgagcctgcgcgacggggccagccgccgcggggaactcgag

SEQ ID NO: 442 - DNA (cDNA), 222 bp; double-stranded, linear
gaattcggccttcatggcctaccgcctcgctgcctggacacctgtccgtgccaccctggtcactgagcaggacatccgcgtctgtggcccctgggaccctgcccccgacagccaggcctgggtttgtccttttaggtagagtgcctggtccaggtcattggaggagagtccacatggccacctctggcgtgttctagagaggccctcccgtctaggctcgag

SEQ ID NO: 443 - DNA (cDNA), 205 bp; double-stranded, linear
ctttatgacagccatgagctttttccggtgcattgcaattgtttttccagtccagaacattaatttggttacacagaaaaaagccaggtttgtgtgtgtaggtatttggatttttgtgattttgaccagttctccatttctaatggccaaaccacaaaaagatgagaaaaataataccaagtgctttgagcccccactactcgag

SEQ ID NO: 444 - DNA (cDNA), 178 bp; double-stranded, linear
gaattcggccttcatggcctacctgcctccctccttgcttcttgctctgctaactcaactctgccttcctctttttcattcttctactctgccctatatggaggacaaatggacaccaggggtgctaaccttattggtgcctgccccagcctaccccaggtgcaagcagactctcgag

SEQ ID NO: 445 - DNA (cDNA), 251 bp; double-stranded, linear
gaattcggccttcatggcctagaaagccacaaactttttagtttttaacttcaaaggcttctttctctttaaaaaaaattatttttaatatagagtcaaaaaattggatgtattattttgagcttctaattgctgccacttggagatgtccaagtaagaaggccttctttttacatgggatgaattgtgcacttctactgatgatgactacagcagaagtgatgttatacgtacaggcacttgaactcgag

SEQ ID NO: 446 - DNA (cDNA), 301 bp; double-stranded, linear
gaattcggccttcatggcctagggcttatattttaactgaactattattaaataaaaacaaaataaaatcttatcatataggtgtaatctgttctaaggaaaaaatccttctatcaagactaaacgtctaactgaatacagaatgacatttcatgccttaaggtctctgtccatgttgttccttctttctactgtcctttactgtattagttcaaaacattctaattcactctccaaaacccaattcaaacatcaccatcagaaagtcttccatgatgggccaggtgtggcggccctcgag

SEQ ID NO: 447 - DNA (cDNA), 150 bp; double-stranded, linear
gaattcggccttcatggcctagctgaaatgctttctattggatactatctgggcatattacttcctgtggttcactgtctgggtgacaggattcatagaagcccaaactttagcaccacgcagcatacccttgtaacaaagccactcgag

SEQ ID NO: 448 - DNA (cDNA), 226 bp; double-stranded, linear
gaattcggccttcatggcctaatttgattttattaggtttaaattgtatttcttcaaatttcataaactatagcatttatctccatatttttaataaatgatcacaaataaatcactgttaatatctccatttacacttttacaactcctgctattgctggatttttcatcctatgatatgttaaaccaatttaaaatacatttaaagaatcacagctgtctcgag

SEQ ID NO: 449 - DNA (cDNA), 453 bp; double-stranded, linear
gaattcggccttcatggcctaagactgggggcatgtaccccacctactttctgcacctggaccgtgaggatgggaagaaggtaaggttggtctgggcatgttatcatctaggctttacagccctttgaaatcctaggggctgaaatgtgactggaagtctcatatctaccgctgacctctcagttcctcaaagaaactgccttcgtgtctggtctgtgcacatctttgtgttttccagtgcatttgtgtgtgtgcacatatgtgcgtttgggagctgacgcaacggagagagtctgtgtgagtggctctcatgactgtgtgcagaccagaggctgagtctggaatatgacctcattccactccccaaggtgttcctcctggcgggaaggaagagaaagaagagtaaaacttccaattacctcatctctgtggaccccacagacttgtctcgag

SEQ ID NO: 450 - DNA (cDNA), 246 bp; double-stranded, linear
gaattcggccttcatggcctaaaagcaaattaacttgttctgaaaagaaagtatagattaattttgttttctgtttaaattttatctccttggtaaagatttttttttcctgggcagaaaacttggcatttttaggcgtagataccttaccttacaatgccaaaatgaatttaattccagtactcaggtttttccctttaacagactctatgtgtaccaggcattgaattctagacctgcctcgag

SEQ ID NO: 451 - DNA (cDNA), 414 bp; double-stranded, linear
gaattcggccttcatggcctagtttggtggggttgaagttgatggcaaactcatgggagaccttccagtctgggggtaactgggccccgaatcccagagctggaaacatcttatcactgtcgtagtcctgaatgatctgcccaacagcccagatggccgacagatattcgttggtgcccatagggttgatatagtgcaaagaggaagggtcgaggggattcccgttggaggctgtaaagtctattccaacggtgaacatgagctggcagcctcccaggatgtagtcaaggaaggagtagtctcggtttatcttgcaggatcgcaggatgatgatgcccgagtttttatagttcttcttcttcctctgcttcttggggttgatgcactcgaactccagcgggacgctgtctcgag

SEQ ID NO: 452 - DNA (cDNA), 374 bp; double-stranded, linear
gaattcggccttcatggcctacacactgactgacagaccacggtatgccttgcaccaccctggctgctggggtccaaagagggatctggtagacctgggctggaatctcagcttcaccatttaccatctgggtggccaatggagtgttacttggcctctctgagcctcggttttgctcgtctctgaaacagtaagatacctccctttggctgttgtgatgaggatgaaggttagcctatgcccagtagtatgcctgtcccttcatcgatgcctgctcatctcactcttgctctggaaacacccctagtagaggcgcagaggggcagggcccaccccacccaccaaaacgtggtgcagaatgaggtgatctcgag

SEQ ID NO: 453 - DNA (cDNA), 288 bp; double-stranded, linear
gcgtccgtccgccgccaccacccactccggacacagaacatccagtcatggataaaaatgagctggttcagaaggccaaactggccgagcaggctgagcgatatgatgacatggcagcctgcatgaagtctgtaactgagcaaggagctgaattatccaatgaggagaggaatcttctctcagttgcttataaaaatgttgtaggagcccgtaggtcatcttggagggtcgtctcaagtattgaacaaaagacggaaggtgctgagaaaaaacagcagatggctcgag

SEQ ID NO: 454 - DNA (cDNA), 383 bp; double-stranded, linear
gaattcggccttcatggcctaagaagtgtctcctgtatccacctcttcctggcctcccttcccccacttcctggtccctgtccactcctcaggttggtgctctcacttcttgaaagctctaggcacccccgcctcccgccaggctccccgttggctcctggcaggccagctgagaatgaacaggagatggaggcaggcagcccaggctgcagaggtgagggatgtggggccaggcccagagggctcagcctagaggcttccaatctcagattctcctgcctgtggtcatctgtttgtccatcaccccaggacagggcagacagaggggcaaagcactgggggccccagagcctagcttcccctcagcctgggggaaactcgag

SEQ ID NO: 455 - DNA (cDNA), 409 bp; double-stranded, linear
agagcacgtcaatgccatgaggggcctgcaaagcagcaaggagctcaaggctgagctggacggggagaagggccgggactcaggggaggaggcccatgactatgaggtggacatcaatggtttagagatccttgaatgcaaatacagggtggcagtaactgaggtgattgatctgaaagctgaaattaaggccttaaaggagaaatataataaatctgtagaaaactacactgatgagaaggccaagtatgagagtaaaatccagatgtatgatgagcaggtgacaagccttgagaagaccaccaaggagagtggtgagaagatggcccacatggagaaggagttgcaaaagatgaccagcatagccaacgaaaatcacagtacccttaatacggcccagaatctcgag

SEQ ID NO: 456 - DNA (cDNA), 317 bp; double-stranded, linear
gaattcggccttcatggcctaaatttcatgaaaaacaaatggcttaaacccagggaagcaaggattataattgatttttttgagcaatgtctcttttggttacaaagtaaaaggtaaaataaaagtttaaaagcatttggaaagaatgttctttggttttttcactcagtaacctaaagtttaatgaccctttacagtgctgataaacacttaaatttttgcagtaggcattgctagttcaaattgaaggaaggttgccaggctcatgcctatagtcccaactacttaggaggctaaggcagggggacgccctcgag

SEQ ID NO: 457 - DNA (cDNA), 510 bp; double-stranded, linear
gaattcggcttcatggcctactgctctttggctaaggtggcagtgtacctctagatcaacctgggcaacagtcacaagggagtgtgacttcttggccataataaactcacttgatagtgtttatgttattaatctgaatgcaacagaagacaaaagcacaggcatgcacacacacagaaccccaaaccactaaaaactacctaaacactgacttagtaaatagtaaaaaggtaatgttgggacttttaaaccttgaatccattagccaggcttgggatgaaaggaccatctaaaatcatgctagtctaaaccatgctcttccacacagctgtttaaaaaccactgggtatgaggaatatgctagaaagaaatgttaaaaatagattgttggctcacacttatttttctaataaataggaccattattactaccaggaaagtcttatttattttgcctgaaattggcttaaagaaagtctcatgacgggatgggatgggccggcactcgag

SEQ ID NO: 458 - DNA (cDNA), 382 bp; double-stranded, linear
gaattcggccttcatggcctagcggaaacaactgaaactaatggaagatatggatacagtaattaaaccccgtcctcaagtagtaaaacaaaaaaaacagcgaccaaaatctattcacagagatcatattgaatcccccaaaacaccaataaagggtcctccagtctctagcctttctttggcatcgctgaacacgggtgataacgagagtgtacattcaggcaagaggacgccaagatcagagtctgtagaaggcttcttatctccaagtcgttgtggcagtcgaaatggagaaaaagactgggagaatgcatcaacaacttcttcagtggcttctggaacagaatatacaggaccaaagctctacaaagaacacctcgag

SEQ ID NO: 459 - DNA (cDNA), 433 bp; double-stranded, linear
gaattcggccttcatggcctactgagtcccaggccggggccctgccccagccagggctgggactctgcagttgggagcttgtccagctgccccctctaatgcttttctcctccaggacacagggagcctccggaagcacagtagtccccgtgtgtcaccttaggctgacctctgtccccaggggtgacgtaatgctgtcactgtcttgaattcttcatcgtttaacagggagcccagtgttttcaccaaaagcagaattggattttttttttaagtcgataaatttttactcaaggaattccatgttgtgatttcttccactgtccatcaaggtcactttagatcctctaaagagctagagtcaaaagatttatcttcaagttagtcctttttaatgaaaccgatgcttattttaatccagtcagccctcgag

SEQ ID NO: 460 - DNA (cDNA), 305 bp; double-stranded, linear
gtccggctaaagtaatccagtcacctgctgctgatactagaagggctgagatgtcacaaacaaattttacccctgacactcttgcccagaatgaagggaaggctatgtcttatcagtgtagcctttgtaagtttctatcatcatccttttccgtgttaaaagatcatattaagcaacatggtcagcaaaatgaagtgatactgatgtgctcagagtgccatattacatctagaagccaggaggaacttgaagcccacgtggtgaatgaccatgacaatgatgccaatatccacaccgaactcgag

SEQ ID NO: 461 - DNA (cDNA), 563 bp; double-stranded, linear
gaattcggccttcatggcctaagaaatatcagtccaagcaagaggaattacagaaagatatgcaaggaagtgcacaggcattggctgaagtagtgaaaaacacagagaacttcttaaaagagaatggtgaaaagctgtcacaggaagataaggctttgattgaacagaaacttaatgaagctaagataaagtgtgaacagcttaatttaaaagcagaacagtctaaaaaggagctggataaagttgtgacaacagcaatcaaggaagaaactgaaaaggtagcagcagtgaagcagctggaagagagcaaaaccaaaatagaaaaccttttggactggttgtcaaatgttgacaaagactcagaaagggcagggacaaaacacaaacaggtaatcgaacagaacgggacccattttcaagaaggtgatggcaagtcagcaattggagaagaggatgaagttaatggtaacctgttggagactgatgttgatgggcaagttggaaccactcaggagaatctgaatcagcaatatcagaaagttaaggcccaacatggactcgag

SEQ ID NO: 462 - DNA (cDNA), 477 bp; double-stranded, linear
gcggctgtgaagatggcggcggctgcgtggcttcaggtgttgcctgtcattcttctgcttctgggagctcacccgtcaccactgtcgtttttcagtgcgggaccggcaaccgtagctgctgccgaccggtccaaatggcacattccgataccgtcggggaaaaattattttagttttggaaagatcctcttcagaaataccactatcttcctgaagtttgatggagaaccttgtgacctgtctttgaatataacctggtatctgaaaagcgctgattgttacaatgaaatctataacttcaaggcagaagaagtagagttgtatttggaaaaacttaaggaaaaaagaggcttgtctgggaaatatcaaacatcatcaaaattgttccagaactgcagtgaactctttaaaacacagaccttttctggagattttatgcatcgactgcctcttttaggagaaaaacaggagctcgag

SEQ ID NO: 463 - DNA (cDNA), 382 bp; double-stranded, linear
gttgcactcctgttgtactcttttagaggtggaaaagaggtggatactgagatctaagaggaaaggatagtcattcacgttctgagatatgcgctctctctattgttctcgaacacaaagggatagtctcttttctggagctgatgtccctgcttggaggttagccccaaaacatggctcttgtattgttctaagagaaaaggctttcattttggttcttctgattggtgttacctactgcctaatatgtgttcattttttgacagagaggcagactattgaaaaagtctgtgtgaacagagagcagttcattaagcccattgctttcagtaatgtggccttgaccccttctgcttcccccttctcccatgacgagctcgag

SEQ ID NO: 464 - DNA (cDNA), 275 bp; double-stranded, linear
ggacctgcctcaaggacatgggtggacatatgggcggactctcagggacaaccaaagtgatgatcacactgaccgatgtcaatgacaacccaccaaagtttccgcagagcgtataccagatgtctgtgtcagaagcagccgtccctggggaggaagtaggaagagtgaaagctaaagatccagacattggagaaaatggcttagtcacatacaatattgttgatggagatggtatggaatcatttgaaatcacaacggactctaaaacactcgag

SEQ ID NO: 465 - DNA (cDNA), 488 bp; double-stranded, linear
gttctagacctaccccgaacagccccaaacagtcagagtggcacaaaatgacagtctccaaaaactgccccgaccaagatctcaaaatcaaacttgctgtccgaatggataagcctcaaaacatgaagcattctgggtatttatgggccatcggtaagaatgtctggaagagatggaagaaaaggttttttgtattggtgcaggtcagtcagtacacgtttgccatgtgcagttatcgggagaagaaagcggagcctcaggaacttctacaattggatgggtacactgtggattacaccgacccccagccaggtttggagggtggccgagccttcttcaatgctgtcaaggagggagacaccgtgatatttgccagtgacgatgaacaagaccgcatcctgtgggtccaggccatgtatcgggccacggggcagtcacacaagcctgtgcccccgacccaagtccagaaactcaacgccatcctcgag

SEQ ID NO: 466 - DNA (cDNA), 300 bp; double-stranded, linear
gaattcggccttcatggcctagccgctgcggtgagccttgaagcctagggcgcgggcccgggtggagccgccgcaggtgcagatcttggtggtagtagcaaatattcaaacgagaactttgaaggccgtctgagctaaaaaataatgctgatttggcctcatcatatttatgaaggagggagaaatagaagcatgtataatgtagaaaaacatatcttatccttatgtttgcatatattgttgaataaatatagtttaatgaatatgttttctcacctttctttgcttgcacttctcgag

SEQ ID NO: 467 - DNA (cDNA), 381 bp; double-stranded, linear
gttctagacctgcctcgagatatgccggaaggttgcatggctggtcccagggccagcacaggcccgaggccgggctgcctggttttatttttatttaactttattttctgttttatgagtgtgtgtccgcccacccccacccccttcagtgttaagtggggagccctgggggagtctctcctgcctcccagcctctcccaagacctcccccctcgtcaccagccatccctctggaccaggcagagggcggaccgggtgggcaggggcctgagggtggctcgggccagcccaccagccaatggacccctcctcaggccgccagtgtcgccctgcccctttttaaaacaaaatgccctcgtttgtaaacccttaacgctcgag

SEQ ID NO: 468 - DNA (cDNA), 304 bp; double-stranded, linear
gctgtccaattatactgacctggccatgagcacggtgaagcagacccaagccattccatatactggtccctttaatttgctctgttaccagctgcagaaattgacaggtgatgtggaagaattagaaattcaagaaaaacctgctctgaaagtgttcaaaaatattactgtaatacaagaaccaggcatggtggtattagaatggctggcaaacccttctaatgatatgtatgcagatacagtaacaactgtgatattggaagttcagtcaaatcccaaaataagaaaaggcgcagaactcgag

SEQ ID NO: 469 - DNA (cDNA), 346 bp; double-stranded, linear
gcgattgaattctagaccaccccgcactccagcctgggcaacagagcaagactctttcttaaaaaaattaaaaaaaaaaggagtacccattgggataaacctctttggaggagaggacatagtacagaggttatactgcaacatggacccaccaatagccatggataacttagttgggattacccctgcctgctgtttagatacttacatggacactaatttctgcccatcaacctccctctctttctccttcaatgcccatcaacctccccctctttctccatcaatgctatgttggttttttttatttgccatcttggcaggtttagggcagagcatgctcgag

SEQ ID NO: 470 - DNA (cDNA), 321 bp; double-stranded, linear
gaattcggccttcatggcctaggattttcagcaagaattaaattattctgcatattggacagggcctatttagaggcctgcacatctgtttttatccatttgtgtaacgataccgtgtgtgaaagtaggttcatggatcagatgagaaaagtcaattctctaagataccttcccttgtggctgtggattctcaccttgatgattcagctttgtgtgatggaggtgtctgccagagaattcctggccacccagctcctcagccctctgcccccacccccaatacacacacctttctccattgtaccagatgctggtctcgag

SEQ ID NO: 471 - DNA (cDNA), 417 bp; double-stranded, linear
gaattcggcttcatggcctacttcattcactgtaaaaccaatagcaaacaacggaagagacgggcagagttgaagcaacaaagagaggaggaggcaacatggcaagagcaggaagcccctcggagagacactcccaccgaaagttcttgcgcagtggccgccattggcaccctggaaggcagccccccaggtatctccacctccttctttaggaaggtgctgggctggcccctcaggctgccgagggacctgtgtaactggatgcagggactcctgcaagctgctggcctccatatcagggacaatgcttacaactactgctacatgtacgagctcctgagcctggggctgccactcctctgggcgttctctgaggtcctggcagccatgtacagggaatctgagggctccctcgag

SEQ ID NO: 472 - DNA (cDNA), 331 bp; double-stranded, linear
gaattcggccttcatggcctacaagaggcagcttatagacaaccgcaagctcattgagacgcaaatggaacggttcaaagttgtggaacgagagaccaaaaccaaagcttacagcaaagagggcctgggcctggcccagaaggtagatcctgcccagaaggagaaggaagaggttggccagtggctcacgaataccatcgacacgctcaacatgcaggtggaccagtttgagagtgaagtggagtcactgtcagtgcagacacgcaagaagaagggcgacaaggatcagaagcaggaccggattgagggcttgaagcagcagcatctcgag

SEQ ID NO: 473 - DNA (cDNA), 260 bp; double-stranded, linear
gaattcggccttcatggcctagaggtgcttcagtggtacaatcagttagcacacagtacgtatacagcagtatgtgtgtgagaaattattttaaatataagaattatcaaaaattataagaagaccatccctttaactgaatagtttcaccaaaaatcagaaaaatatgtaagtgatacattttgtttcttggatatagcaatgtaccaccttgcataaatgagactattaaaatgatcacctgaggtcagaagttcgag

SEQ ID NO: 474 - DNA (cDNA), 511 bp; double-stranded, linear
gaattcggccttcatggcctacaaagatttgaggaaaagaggttcaaattggaccactcagtgagtagcaccaatggccacaggtggcagatatttcaagattggttgggaactgaccaagataaccttgatttggccaatgtcaatcttatgttggagttactagtgcagaagaagaaacaactggaagcagaatcacatgcagcccaactacagattcttatggaattcctcaaggttgcaagaagaaataagagagagcaactggaacagatccagaaggagctaagtgttttggaagaggatattaagagagtggaagaaatgagtggcttatactctcctgtcagtgaggatagcacagtgcctcaatttgaagctccttctccatcacacagtagtattattgattccacagaatacagccaacctccaggtttcagtggcagttctcagacaaagaaacagccttggtataatagcacgttagcatcaagactgaaaactcgag

SEQ ID NO: 475 - DNA (cDNA), 610 bp; double-stranded, linear
gaattcggccttcatggcctagtcacagctgtctatttttgtcactgtcggaacattgttcatcgtgatttaaaagctgaaaatttacttctggatgccaatctgaatatcaaaatagcagattttggtttcagtaacctcttcactcctgggcagctgctgaagacctggtgtggcagccctccctatgctgcacctgaactctttgaaggaaaagaatatgatgggcccaaagtggacatctggagccttggagttgtcctctacgtgcttgtgtgcggtgccctgccatttgatggaagcacactgcagaatctgcgggcccgcgtgctgagtggaaagttccgcatcccattttttatgtccacagaatgtgagcatttgatccgccatatgttggtgttagatcccaataagcgcctctccatggagcagatctgcaagcacaagtggatgaagctaggggacgccgatcccaactttgacaggttaatagctgaatgccaacaactaaaggaagaaagacaggtggaccccctgaatgaggatgtcctcttggccatggaggacatgggactggacaaagaacagacacagaaggcggctcgag

SEQ ID NO: 476 - DNA (cDNA), 409 bp; double-stranded, linear
ggagattggccacctccaagatatggtaaggaaaagtgaacaaggtcttggctctgcagaaggacttattgctagtcttcaggactcccaggaaaggcttcagaatgagcttgacttgactaaagacagcctaaaggagaccaaggatgctctattaaatgtggagggtgagctagaacaagaaaggcaacagcatgaagaaacaattgctgccatgaaagaagaagagaagctcaaagtggacaaaatggcccatgacttagaaattaagtggactgaaaatcttagacaagagtgttctaaacttcgtgaagagttaaggcttcaacatgaagaggataagaagtcagcaatgtctcaacttttgcagttgaaagatcgagagaaaaatgcagcagagaaactcgag

SEQ ID NO: 477 - DNA (cDNA), 272 bp; double-stranded, linear
gtatgcctgttccagaccagccttcatcagcctcagagaagacgagttccctgagccccggcttaaacacctccaacggggatggctctgaaacagaaaccacctctgccatcctcgcctcagtcaaagaacaggaattacagtttgaaaggctgacccgagagctggaggctgaacggcagatcgtagccagccagctggagcgatgcaagctcggatccgagactggcagcatgagcagcatgagttcagcagaagagcggatactcgag

SEQ ID NO: 478 - DNA (cDNA), 284 bp; double-stranded, linear
gaattcggccttcatggcctatgcgtgggggtgggggggcaggctagaaaggagccctccctcctcggggtgtctagggtgtgctggccactggaagattggagtcgctgacccagtgctgaccctgacccttggctgggtccactctgcagactccacctgaggagacccacccagggtgaagctcggtgcccaggcctgaactgagcccggccgggtgcaagggctgaggtgtgaggtcggcccaggcctcttcccaggcctgagggtggctacagctcgag

SEQ ID NO: 479 - DNA (cDNA), 352 bp; double-stranded, linear
gaattcggccttcatggcctactaaattttccaaaacgttgatttgcataatacagtggtatgtgcaatggataaattgccgttatttcaaaaattaaaattctcattttctttcttttttttcccccctgctccacacttcaaaactcccgttagatcagcattctactacaagagtgaaaggaaaaccctaacagatctgtcctagtgattttacctttgttctagaaggcgctcctttcagggttgtggtattcttaggttagcggagctttttcctcttttccccacccatctccccaatattgcccattattaattaacctctttctttggttggaacgacctcgag

SEQ ID NO: 480 - DNA (cDNA), 263 bp; double-stranded, linear
gaattcggccttcatggcctattaaaagaatgttctttcattaaaagaccaaaaagaagttaaaacttaaattgggtgatttgtgggcagctaaatgcagctttgttaatagctgagtgaactttcaattatgaaatctgtggagcttgacaaaatcacaaaaggaaaattactggggcaaaattagacctcaagtctgcctctactgtgtctcacatcaccatgtagaagaatgggcgtacagtatataccgtgttctcgag

SEQ ID NO: 481 - DNA (cDNA), 379 bp; double-stranded, linear
ggagcaggaagaaatgcaagaggagatggagaagctgcgagaggaaaacgagactctcaagaacgagatcgatgagctgagaaccgagatggacgagatgagggacactttcttcgaggaggatgcctgtcaactgcaggaaatgcgccacgagttggagagagccaacaaaaactgccggatcctgcagtaccgcctccgcaaagccgagcgcaaaaggctccgctacgcccagaccggggaaatcgacggggagctgttgcgcagcctggagcaggacctcaaggttgcaaaggatgtatctgtgagacttcaccatgaattagaaaatgtggaagaaaagagaacaacaacagaagatgaaaacgagaatctcgag

SEQ ID NO: 482 - DNA (cDNA), 301 bp; double-stranded, linear
gaattcggccttcatgctttctaggcaagaggtcatcagaagattgagagaaagaggagaaccaatcagactatttggagagactgattatgatgcttttcaacgtttaaggaaaatagagatcctcacaccagaagttaacaagggattgaggaatgatttgaaagcagccttggataagattgatcagcagtacctcaatgaaatcgtcggcggtcaggagcctggagaggaagacacacagaatgatctgaaagttcatgaggaaaacaccacaattgaagagtcagaggccctcgag

SEQ ID NO: 483 - DNA (cDNA), 168 bp; double-stranded, linear
tggtctccagaaatgctttgggttcatctttcattgctgcaaggaacttccatgcctctaacactcatcttcaaaagactgggactgctgagatgtcctctattcttgaagagcgtattcttggagctgatacctctgttgatcttgaagaaactgggctatctcgag

SEQ ID NO: 484 - DNA (cDNA), 452 bp; double-stranded, linear
gcaagctctccatggaaacccctgccaaaacagaagagataaaactggaaaaggctgagacagagtcctgcccaggccaagaggagcctaaattggaggaacagaatggtagtaaggtagaaggaaacgctgtagcctgtcctgtctcctcagcacagagtcctccccattctgctggggcccctgctgccaaaggagactcagggaatgaacttctgaaacacttgttgaaaaataaaaagtcatcttctcttttgaatcaaaaacctgagggcagtatttgttcagaagatgactgtacaaaggataataaactagttgagaagcagaacccagctgaaggactgcaaactttgggggctcaaatgcaaggtggttttggatgtggcaaccagttgccaaaaacagatggaggaagtgaaaccaagaaacagcgaagcaaaggactcgag

SEQ ID NO: 485 - DNA (cDNA), 352 bp; double-stranded, linear
gtttgtaaatcacctgatgatggtgatatagctgtggccaacgaaatgtcaagggaagtctgctggggaaggtagacgtaggataggagtatgggaaaaaattattcactcaaaagcatgatgcacagaggagctatgatcttttcttgttttcctcactggatgttgtcatgtctgtatgtacttcctggaactgtggcaccatcttacaaccatgaaaggagctcacatgaaatcatgttgaacatagcagagcgggaagatggaaggaatccgagatctatgtttgatgttaagcgatgatgttaaaaacttaaaaaactccagaactctcttacccctggtgctcgag

SEQ ID NO: 486 - DNA (cDNA), 420 bp; double-stranded, linear
gaattcggccttcatggcctactcagctggaagctttactccctcctcgacagaaagtgaggattacagatgacatggatcaggtggagctgaaggagttttgtcccaatgagcagaactggcgtcagcacagggaggcctacgaggaggacgaagacgggccccaggctggagtgcagtgccagacggcatgacgtggtgcggggcagcgtggccccaccggactagcacatgatgaatgtaaagttggcacaatgaaaatgacatcgctttaatggccttgtgtttgggatgtcctgtgtatgtgttcagcattcttaattgctgagtgtctttttggcttttcttttggttgtaacttaagttatagcttaatttatatttaaatgttttaagtataaatcacctctaggcctcgag

SEQ ID NO: 487 - DNA (cDNA), 318 bp; double-stranded, linear
ggagtgtcaagaataaccgctcaggttgagtgtaaaaatattttatggtcccatcagcatcaacctgccttaatgcttctttggttgtctcttcagctagttcttattttacagcacatgatatatgaagtgatttcacaccatgcccaagatacgggccacccaccagctacatggcatgatgactctgcaggccgaacggcagccttgataattataaggccatgggtaatagccccccaggggttcacagatcttctggcagtgggtgtagctccgcctacattctatacaacagattccttcgcctgcctcgag

SEQ ID NO: 488 - DNA (cDNA), 487 bp; double-stranded, linear
gaattcggccttcatggcctaggtgtttgctttaaggaggaatagaaaaatcaggtggtcactactacaagggaaaggggaatgtggtttcaaaaagggttttgccttatttatttttatagtagatacttattaatcaaacatttaagagcaactcagtaagtatttgtccagaatgaactgttctcaagactaggtttactgcttgacattagaggttaaggtgttgcaattctgagtcttgttttttattactaccaacccccacccccgccgatattacttcatctccctccaaggtcactgaagtttttcataactattttaacagatattgcaataaatgtacagtaatttaactatccttcttgctgggcatgtcaaagtgttttctattattacagataatgctgcaatgaatctttatttatataatacacttttatccagttgtcattttttctttgtcttatattctcacatggaa

SEQ ID NO: 489 - DNA (cDNA), 149 bp; double-stranded, linear
gcgattgaattctagacctgcctcgagacaaaaactgtgaatagtgagtgatttaaaaaaaaaaaataaactgaaaggaaaattgttgaatgtttgaatcttgcctagtcccctcacccccaaggctggcttctagagttaagctcgag

SEQ ID NO: 490 - DNA (cDNA), 259 bp; double-stranded, linear
gcaaattttggaagatttagaccattatttctcaaaatatttcttacctgctctctcctctttctcccactcctccccatcaccttctggcacttccattgttcatatattgatatgcttaatgatgtttctgaagatttattcatttttcctttattcctttttattctgttcctcagcccagatcatttcaatgcacatatcctcaagtttgctgattctttcatttcctgctcagatctgctgctggcccctcgag

SEQ ID NO: 491 - DNA (cDNA), 320 bp; double-stranded, linear
gaattcggccttcatggcctacaaatgtttaatcagagactcatattcacctttaagtaaaaaacatacttctttccccctaatagtcacagcattctgcagagctaaagaaggagaccaggagtctgtgggagcaaagatcattttgtgaagctagaggtccaatttaaaagcagttgctgctacaaattaaaacatatttgcattctgcctaaaatagttgtctctttgaacgttgggtgccttttttaggttgctttgtgaataatatgcacaaaatgaaaatgttaaaaaaaacatgtagcctgctaaccctcgag

SEQ ID NO: 492 - DNA (cDNA), 224 bp; double-stranded, linear
gaattctagacctgcctccagccacttcaaacctttggtgaccaaagtggggtaaaaacaagcacctgcgtgcgttgtggttattctatgctctccaatatatataaattttaagaagtttttcttgaggtggtcagttcttaaaccaagaaagtggtagtagttgattttaattagtgtaaagttgtcttcgtaacttccgtgttggttggaaatagctcgag

SEQ ID NO: 493 - DNA (cDNA), 320 bp; double-stranded, linear
gaattgccttcatggcctaccgaatcagacagaagaaagcccagggctccacttcttctacaaggttgcatgagcccgagaagaatgccagagaaataacacaggacacaaatgatatcacatatgcagacctgaacctgcccaaggggaagaagcctgctccccaggctgcggagcccaacaaccacacggagtatgccagcattcagaccagcccgcagcccgcgtcggaggacaccctcacctatgctgacctggacatggtccacctcaaccggacccccaagcagccggcccccaagcctgagccgtccctcgag

SEQ ID NO: 494 - DNA (cDNA), 504 bp; double-stranded, linear
gaattcggccttcatggcctaggtagctctatggttttcctcgcgttcttgagtcgggaaatggccgctgtgtggttgcaacggagataaattcccggaaccgcgattcggcgtgtcaggaattcgaatttagagtttaatttctcagagcattctctccaggaagaatttttacagtatctcaaagacttcacttgacttcttgatcctgcataaaaccaaggagaaaagaaatgggtcgctccaattctagatcacattcttcaaggtcaaagtctagatcacagtctagttctcgatcaagatcaagatctcattctagaaagaagcgatacagttctaggtctcgttccagaacatattcaaggtctcgtagtagagatcgtatgtattctagagattatcgtcgcgattacagaaataatagaggaatgagacgaccttatgggtacagaggaaggggtagagggtattatcaaggaggaggaggtagaaaccctcgag

SEQ ID NO: 495 - DNA (cDNA), 190 bp; double-stranded, linear
gaattcggccttcatggcctaccaacttagtcatttgaagcccaagagtctaattttatatgccctgccaatgtcctcatctattgcagaatgnataattatctatttgttttggactatatgttacaaaaatttaaaacataagatcctctctctatatttcattattggtgaacccacattgctcgag

SEQ ID NO: 496 - DNA (cDNA), 305 bp; double-stranded, linear
gaattcggccttcatggcctaggtaagaaaatcgtcaatgaattgtggcatgaccaggtggagagtaagtgtcataaagagggatagtggatagtataatgtcaggcacctcaaaggaactgggcagggagttagggagtaaaaagggcggtggtctggaagcagaaaggaggagcagtggtccagtaggggctgcagagctgcaaggctttgcctcaatcctgtcaaaggcaacttcaagctttccaggagccatactccttcatttgttcattactttctagattaggaaatcaccactcgag

SEQ ID NO: 497 - DNA (cDNA), 334 bp; double-stranded, linear
gaattcggccttcatggcctaggtggaccaatgtacagcactcaggttcatggccaactgggtggactatttcagtactctacaggtgcctcagtggagggagagcccattgtccaggtgcttcctgggacaataccagagcgctctgggaaaagggctgcttgcaggcacgagggctcacaatgagccatggtgggccaccgccacggcccatgcagcctaatagcaagccaaggcaggaagctgtgagagctgctcaacagtgccccctagggactggttacttcctgaccctaacctccggaaatctgctgtcaaaggcagatttctcgag

SEQ ID NO: 498 - DNA (cDNA), 160 bp; double-stranded, linear
gaattaggggctttttcatccttaggagacctgagtcctcaagaaaacccttttctggaagtatctgctccttcagaacattttatagaaaagaataatacaaaacacacaactgcaagaaatgcctttgaagaaaatgattttatggaaaacactcgag

SEQ ID NO: 499 - DNA (cDNA), 276 bp; double-stranded, linear
gaattcggccttcatggcctactcgatctcctgacctcgtggtccacccgcctcggcctcccaaagttctgggattacagacgtgagccaccgcgcccggccttgtcctggattttttaaccaagcactattatttatagttgcgttaaaataaatagggatgggtttgataagtcaccacttggtgctttaaattctgccatcatcttttctaggagtgtaagatatagagatacacataagcagaaaattttttttaacatgaggatactcgag

SEQ ID NO: 500 - DNA (cDNA), 256 bp; double-stranded, linear
gaattcggccttctggcctagacctgcctctgatatgtacttggtttttaaaaacccattttgttctctcttgtttcctctctatttcagcctagtatcagaaggccaggcgagactgcaacactgctcatcaccccgcggcgtgatccctgctcttaggtgctgggcagaggggaagggtggtcagggtgaggatggtgagggagggctggtgaggggctcagaggaatacttggaacaacagcagtgtctcgag

SEQ ID NO: 501 - DNA (cDNA), 635 bp; double-stranded, linear
gaattcggccttcatggcctagtggttttgttgttgttgtcggagacagggcctcgcttggtctcccaggctagagtgcagtggcatgatcacgactcactgcagtctcgaccttctgggctcaagtgatcctcctgtgtcagcctcccacacagctgggactacaggcacatgccaccacatccagctaatttaaaaaacattttttttgtagaaatagggtcttaccatgttgcccaggctagtctcaaattccggggctcaagcaatcctcccacctcaccttcccaaagtgctgggattacaggcatgagtcaccatacttggcccgagtgagccaagattgcaccactgcactccagcctgggctacagagcaagacactatcttagatccnnaaaggaaaaaaaaaaaagaaggagaaagaaccagagaaacataaggaagagtgagaggaagaaagaaagatgcaatttgggaagaaatgaaaaagaaatgaataaagaataaaataatgtaacggtcaataaataggacttgtgaatggaggcctttaggccaaaggctatgattaatttcaagctatgttactgaagtccataaacaaaggactcagatctaaatgggtactcgag

SEQ ID NO: 502 - DNA (cDNA), 452 bp; double-stranded, linear
gaattcggccttcatggcctacccgtagaaatccccctttctctaatagcgaggctctaaccacacagcctacaatgctgcgtctcccatcttaactctttgcctttgccaccaactggccctcttcttacttgatgagtgtaacaagaaaggagagtcttgcagtgattaaggtctctctttggactctcccctcttatgtacctcttttagtcattttgcttcatagctggttcctgctagaaatgggaaatgcctaagaagatgacttcccaactgcaagtcacaaaggaatggaggctctaattgaattttcaagcatctcctgaggatcagaaagtaatttcttctcaaagggtacttccactgatggaaacaaagtggaaggaaagatgctcaggtacagagaaggaatgtctttggtcctcttgccatctataggggcgctcgag

SEQ ID NO: 503 - DNA (cDNA), 286 bp; double-stranded, linear
gaattcggccttcatggcctacaaaattgtcttgacataagtaatttgggtatgctgtataaaggcttctaagaattaagaaacatggcccgggttgcaaattttaatgcatgactacctttttttctatagaatatagcttttgtcagattctcagcagtggctctgatccagaaaacattaagaaccactggtcatgagtggtgattttcagcttttttggtcttaacccacttaggtgggacagaagctccttatctcacctataccatccagcatcctcgag

SEQ ID NO: 504 - DNA (cDNA), 424 bp; double-stranded, linear
gaattcagccttcatggcctagaggggtttaggattcaaagcaaaggggagacagctactaagtaaactacaaaataattgctaaactgaaaattgtataaagtgtactggacagatgatgttcctaattcttatccatgaaatattttctgccttcttagaggaaatagcacctgacacaacactagccacattgtaggtgatcaatcagcacatgtctaaataaattaattaaaaaagaatcaattagaaattccactgaaaattcttcttaaatataaccaacttcattatgacaagctatgaatatagagcttacatacatgttatatatcaatatgtgagtagataaagaatgaatgccttaaattgttggattttttattgtttttgttcttgttttggagatggggtctcactcgag

SEQ ID NO: 505 - DNA (cDNA), 204 bp; double-stranded, linear
gaattactcagttttcaggttcttcctagctcggggcttttaaattttgaaatctaaacattctttcccaccatcctttttgactgttgaccttggttttctcttctaagtttctgtccctctgcttccttactttttttcctttttgaattctatctttatctgtcttttgttcactttttaatgctatatatggatctcgag

SEQ ID NO: 506 - DNA (cDNA), 218 bp; double-stranded, linear
gaattcggccttcatggcctataggccatgaaggccgagatgtacagtaataagtatgcacagaaatgttagattatttttgaagatgtggagaaactactgttatttttgcttatattcttctctaaaaattcactaaatgaataacagttattggttttgctattcaagataattataaaaatatctattatagctaatcttcacatgaactcgag

SEQ ID NO: 507 - DNA (cDNA), 352 bp; double-stranded, linear
gaagtttaacatttcaactgttggtaaaatctccctggtgccaccttgtcgcacccccctgttatgaggcacagttagtgggtttatgagaggtttgttcagtgaagctcctgccactgtagacctaaatgtttctctccctgttgaagtgacctgccttcctctttagtacctaacacagttggcaaagagcatggctaactcaaacccttttctttgggggcaggcttccctttctctctggcaggtatattaaaaaattacaaaatagtaaatttgccaaatttttcttggtgtgtagcaaggcataaagactgaaaaatatcttatgaattagttcacttccctcgag

SEQ ID NO: 508 - DNA (cDNA), 283 bp; double-stranded, linear
gaattcggccttcatggcctaaaatgatacagtgtgcagaactggacccagtagggaatgataaaatgtacagatgtgcagaacaggacttggtaggactcagcagagaaaacaggaggagagatgaaaatgatatggtgtgcagaactggactcagtaaggtgcggaaaggggaaggattctgacagaatccagcacaaaaacagagagggtgcagaaaaagagatttggtcacttagacgtgtggagttggaggagcctgtgggaaatccaggatctcgag

SEQ ID NO: 509 - DNA (cDNA), 325 bp; double-stranded, linear
gaattcggcctcatggcctactctcctttcttaacttgtgtacttgggggcacttttgattttggtcccacatcattgaggaagctggcccagagttcgtcctccttctttttcctggcatcctctgatccaatgcctttttcctgctctgcagcgtcatcttcctcctcactactgcttccctcagattctgaattggcatcctcctcttcctcttcttctaatgagaggccaccttgtcttctcttcctggctggaatgctctgggcctttctttttttcccttgggttttctgtgtctgctcttcaccattaggccatgaag

SEQ ID NO: 510 - DNA (cDNA), 281 bp; double-stranded, linear
gaattcggccttcatggcctagacaggaggtcattggggattttagaaggttacactggatacatttccattaagcttcacgatatcccacaggtccattctgtgtgaaatggtctaaaaatttcctgttctcatgcttcatttttttcttttagtaatattcctaattgtgtaaaatagtatttcttttcatttatcttaattatgttatattaagatatcatgtgtatgcttaaattatacttttgggcttcaaatgagtgaccccactcagactcgag

SEQ ID NO: 511 - DNA (cDNA), 250 bp; double-stranded, linear
gaattcggccttcatggcctaattcccttgactcaagacagctaacttcattttcagaactgttttaaacctttgtgtgctggtttataaaataatgtgtgtaatccttgttgctttcctgataccagactgtttcccgtggttggttagaatatattttgttttgatgtttatattggcatgtttagatgtcaggtttagtcttctgaagatgaagttcagccattttgtatcaaacagcacgctcgag

SEQ ID NO: 512 - DNA (cDNA), 233 bp; double-stranded, linear
gaattcggccttcatggcctaattgattctaatctttcccaaacagtgctgtggcaatgtatgaaagtaataaaaataatcctttttctgttaaaaaaaaaattgctgttacttgctgttttgttatgcttttgctggagattttcccacccatcttaaagcagcaacttcaggatgggggaatcaagcaaaaccatggtgaagagattcatttaaagaggacaagtctcgag

SEQ ID NO: 513 - DNA (cDNA), 358 bp; double-stranded, linear
gaattcggccttcatggcctagtcaccttttgtgggaacttctctcagcgaagcggagcatgcgaatttgacatcatgattgtctgaaaattggtaagccactatcccagaaagagctccctatgcccagggcttgcaatgctaagagaaggaggcaggagagagacagggagcgacactacatttggtggggtgaggatatgaggttccttggacatcatggcctccagtgaatatgtgggtgatggcttggaacttaagcttttttgctagtgccccacaaaagagtaccctccacaacccatctgtggaccacagcagtgcctctcaacaaacatgtgccccaaggagtctcgag

SEQ ID NO: 514 - DNA (cDNA), 337 bp; double-stranded, linear
gaattcggccttcatggcctagaatagaggaaaatagccgcctggtggctagacaatttaggtgtagaaaacacatttatatggttctttgaatgtaacagtggtaaagaatataggtttagttgttgctgctaagtagggggaaatgacatttttatctggtatgtttgagaataaagtaaatttcaaaatttgagatgatcgaagtttttatttataaacttaagtattattataatatgttacatattttattctttaaaaattgtaattcagagagtgtaacaaaatgtacttcctcactttcttgctttttgtttcccagaagtaactcgag

SEQ ID NO: 515 - DNA (cDNA), 366 bp; double-stranded, linear
gaaaagatggaagaaaaccaccatagcactgcagaagaactacaggctactctacaagaattatcagaccagcaacaaatggtacaggaattgacagctgaaaatgagaagctggtggatgaaaagacgattttagagacatcctttcatcagcatcgagagagggcagagcagctaagtcaagaaaatgagaagctgatgaatcttttacaagagcgagtaaagaatgaagagcccaccactcaggaaggaaaaattattgaactggagcagaagtgcacaggtattcttgaacagggccgctttgaaagagagaagctactcaacattcagcagcagttgacctgtagcttgcggagactcgag

SEQ ID NO: 516 - DNA (cDNA), 329 bp; double-stranded, linear
gcgagtgagccggggtagcatcacctcactccagcctaggtgatgacagagttagattttgtctcaaaaaagaaaaagaaaacaattccaggattattatttctacgtaaatgtgacatattatttctatgatattatttctttgatctcgtagccacactgttcccaataatgattatgagaaaaagtaccctctgtttgaaggcaatcatggggaaaatataattcacaaagtattttaaaattaaaatcctgtgtatttcaaaagacgatggtcctattttaagaaaaataaccttgcaattcatttgctttttcattggctcgag

SEQ ID NO: 517 - DNA (cDNA), 368 bp; double-stranded, linear
gaattcggccttcatggcctagtcctttcaagtacacagagaaattttgcttgaatttctggaggaagagtccagggttcgggaaaagggactgggtggtatctatctggggccccagacagcggcacttctttcttctgtgctggaattcggcgaacaatcatatcatctttttccaaatccggaagtacaagttcaccttctctacactgtaaaattatatctcgctctacagaatcatcttgctcagagaactttctaaagtcttcaaaagctcggagaacatatggatttgcatggaaagccccagtctttctgacaaagaaatcatcattctctaagtcaggatccagggctgccatctcgag

SEQ ID NO: 518 - DNA (cDNA), 397 bp; double-stranded, linear
gaattcggccttcatggcctacgctgagatcaagattcggagtttgggctgcctaatagctgcaatgatactgttgtcctcactcaccgtgcaccccatcttgaggcttatcatcaccatggagatatccttcttcagcttcttcatcttactgtacagctttgccattcatagatacatacccttcatcctgtggcccatttctgacctcttcaacgacctgattgcttgtgcgttccttgtgggagccgtggtctttgctgtgagaagtcggcgatccatgaatctccactacttacttgctgtgatccttattggtgcggctggagtttttgcttttatcgatgtgtgtcttcaaagaaaccacttcagaggcaagaaggccaaaaagctcgag

SEQ ID NO: 519 - DNA (cDNA), 640 bp; double-stranded, linear
gaattcggccttcatgcctactttggtaacagaagagaagactgtggagccagctaccgtctcagaagaagcaaagcctgcatctgaacctgctcctgcccctgtggaacagctggaacaagtagacctgcccccaggagcagaccccgataaagaagctgccatgatgcctgcgggtgttgaggaaggttcatcaggtgaccagccgccttatctggatgccaagcctccaactcccggggcctcgttttcccaggcagagagcaacgtagatccagagcctgacagtacccagccactttcaaaaccagctcagaagtctgaggaagccaatgagccaaaggccgaaaagccagacgccactgcagatgctgagcctgatgcaaaccagaaagccgaagctgctcctgagtctcagcccccagcttctgaagatttagaggttgatcctccagttgctgcaaaggataaaaagccaaacaaaagcaagcgttcaaagacccctgttcaggcagctgcagtgagtatcgtggagaagcccgtcacaaggaagagtgagaggatagaccgggaaaaactcaagcggtccaattctcctcggggagaagcacagaagcctttggaattaaagacactcgag

SEQ ID NO: 520 - DNA (cDNA), 469 bp; double-stranded, linear
gaattcggccttcatggcctagcaagagaaagagaagtgcaaacactcccacggcgaagcgccctccgtggacgcggatcccaagttacccagtagcaaggagaagcccactcactgctccgagtgcggcaaagctttcagaacctaccaccagctggtcttgcactccagggtccacaagaaggaccggagggccggcgcggagtcgcccaccatgtctgtggacgggaggcagccggggacgtgttctcctgacctcgccgcccctctggatgaaaatggagccgtggatcgaggggaaggtggttctgaagacggatctgaggatgggcttcccgaaggaatccatctggataaaaatgatgatggaggaaaaataaaacatcttacatcttcaagagagtgtagttattgtggaaagtttttccgttcaaattattacctcaatattcatctcagaacgctcgag

SEQ ID NO: 521 - DNA (cDNA), 202 bp; double-stranded, linear
gaattcggccttcatggcctacccgtttcctctagtttcttcctgtagtactcctcttttagatcctaagtctcttacaaaagctttgaatactgtgaaaatgttttacattccatttcatttgtgttgtttttttaactgcattttaccagatgttttgatgttatcgcttatgttaatagtaattcccgcggccttcatg

SEQ ID NO: 522 - DNA (cDNA), 492 bp; double-stranded, linear
gaattcggccttcatggcctaaatttaatgaagcaaaattccatacatcattttgaaaatagtgtttctttccctgataggcctgttctgcatcattcttttagcttccttctgccctgtttatcacttggtcccacttttatatttttcctcttcggtccagaatttcttatttagtttcttgtattttgcctactccctcccttctccatgattcagcctagtctttccgtcctctgtggacttgggtgtgccttcctctgggccacctcgtcttttgctgctgttagccctcccgcctgcgcacctgccacttcaccctcgcctgtggtccacttacgttccactcagcccggtcagtcctgctttgttcttctccaccgccttggtctcccgtgtgtcttatctagctctggttccttctcgtctccacatttattttgttttcttcctgtgcttgttagtccttgtgcacttggcccttttctcgag

SEQ ID NO: 523 - DNA (cDNA), 394 bp; double-stranded, linear
gaattcggccttcatgcctaggaaatttcaccatttggtctccccctttgtgggtcagcaggtggtcaagacagggggcagcagtaagaagctacagcccgccagcctgcagtctctgtggctccaggacacccaggtccatggaaagaaattattccttagatttgatctagatgaagaaatggggccccctggcagcagcccaacaccagagcctccacaaaaagaagtgcagaaggaaggggctgcggacccaaagcaggtcggggagcccagcgggcagaagacccttgatggatcctcacggtctgcagagctcgtcccccagggcgaggatgattctgagtatttggagagagacgcccctgcaggagatgctgggaggtggctcgag

SEQ ID NO: 524 - DNA (cDNA), 600 bp; double-stranded, linear
cgattgaattctagacctgaccaaagaccttccgtacagattgaccgcagaatgtcagggaaagttaggagaagaagttctgagaagactgactacagattggctggcctggctgacccaggaacttctgagcagactgacctcagattgtatggcctcgttgaccacaaaacatctgtaaagactcaccaccaagtgtacggccaagccactgaactagctgaacaccaggctattgaccaagctcatagtaatgctgatcaacctccagttgacaatgctcactacactgaatctgaccagactgaccacttagcagacagacaagctaatcataaagaccagctgtcttactatgaaacacgtggccagtctgaagacagaatatttccccagttaggcaacagcaaagaggacaaagaggctgactacagagtacaaccctgcaaatttgaggatagccaagtagacctcaattccaagccttcagttgaaatggaaactcagaatgcaaccactatcccaccctacaacccagttgatgccagattcaccagtaaattccaagcaaaagaccaagctcttttcccaagactcgag

SEQ ID NO: 525 - DNA (cDNA), 466 bp; double-stranded, linear
gaattcggccttcatggcctactttcttctgctggcttccatcttgccacactttcttgctcttccttctaactgaaagactacttctccatcccctctgcaggctcttttgctccacctgatatttaaatgttggaatgcctagagttgttctgacccttctttatctaccccgatttcctcagtgatcttatgcagaggtctcccaaagtttacatggctatccttgacctccttcctgaactgcagctggtgtcagctgccgtcacttggatgtttaatcagcaactcaaggtttacgtgatgattagaccgcagttacccccagacttccttatcccttagttttccccatctcattaagttcacttccattcaccttcttgatgaagccaagtatttcagaactagccttgtttcttctttttcactttcccccatatcaattccagactacccactcgag

SEQ ID NO: 526 - DNA (cDNA), 559 bp; double-stranded, linear
gaattcggccttcatggcctacattgtagaagagatcacagaaaccacaaaaggttttctgaagtatatggataatcaatcatttgcaactgaaagtcaggaaggagttggtttgggacattcaccttcatcctatgtgaatactaaggaaatgctaaccaccaatccaaagactgagaaatttgaagcagacacagaccacaggacaacttcttttcctggtgctgagtccacagcaggcagtgagcctggaagcctcacccctgataaggagaagccttcgcagatgacagctgataacacccaggctgctgccaccaagcaaccactcgaaacttccgagtacaccctgagtgttgagccagaaactgatagtctgctgggagccccagaagtcacagtgagtgtcagcacagctgttccagctgcctctgccttaagtgatgagtgggatgacaccaaattagagagtgtaagccggataaggacccccaagcttggagacaatgaagagactcaggtgagaacggagatgtctcagacagcacaaggcctcgag

SEQ ID NO: 527 - DNA (cDNA), 318 bp; double-stranded, linear
gaattcggccttcatggcctacgcagtggttcaattttcttcgaaacggtgtggtccctgcaaaaggatgtttcctgttttccatgagctggctgaaacttgtcacatcaaaacaatacccacatttcagatgttcaagaaaagccagaaggtaaccctattctcaagaatcaaaagaataatttgctgttatagaagtggattcatgagcaacctgatttttgagttttgtggagccgatgctaaaaaattggaagccaagactcaagaattaatgtaagctgatctccaaggcaaaatacacttgtgccgctcgag

SEQ ID NO: 528 - DNA (cDNA), 276 bp; double-stranded, linear
ggcacagacttaccggacacacaggtcatgggacacagagtcatggggcacacaggttcacagggcacacaggctcacgggacacagagtcatgggacacacaggctcacagggcacacaggctcacaggacacacaggttcatggggcacagagtcatggggcacagactcacagactcacaggtcatagacgctcatggggcgcaggctcacagggcacacagactcagggcacacaggctcatggggcacagagtcatggggcagggctcgag

SEQ ID NO: 529 - DNA (cDNA), 180 bp; double-stranded, linear
gaattcggccttcatggcctattctgttctttaaatttgaatgaaagtttggcattttaaaaaactttaggtgatttaggagtataattttaagcagatttttagagtacgagtgtccacatatttaactaaacattcaaaaattagttaaaatcaatgaacttgggaaggatcctcgag

SEQ ID NO: 530 - DNA (cDNA), 470 bp; double-stranded, linear
ggggacagaagatgtgctccagggtccctctgctgctgccgctgctcctgctactggccctggggcctggggtgcagggctgcccatccggctgccagtgcagccagccacagacagtcttctgcactgcccgccaggggaccacggtgccccgagacgtgccacccgacacggtggggctgtacgtctttgagaacggcatcaccatgctcgacgcaggcagctttgccggcctgccgggcctgcagctcctggacctgtcacagaaccagatcgccagcctgcccagcggggtcttccagccactcgccaacctcagcaacctggacctgacggccaacaggctgcatgaaatcaccaacgagacccaggcccttcagcaccgttcacagtattttgaaggtgttgtgaagtgcaataagctggaaatactggagaccatcgtggacagaatagtaagagccctcgag

SEQ ID NO: 531 - DNA (cDNA), 553 bp; double-stranded, linear
gaattcggccttcatggcctagaaaattccagaaaggatatttaagaaaatacaataaactattggaaagtactcccctaacctcttttctgcatcatctgtagatactagctatctaggtggagttgaaagagttaagaatgtcgattaaaatcactctcagtgcttcntactattaagcagtaaaaactgttctctattagactttagaaataaatgtacctgatgtacctgatgctatggtcaggttatactcctcctcccccagctatctatatggaattgcttaccaaaggatagtgcgatgtttcaggaggctggaggaaggggggttgcagtggagagggacagcccactgagaagtcaaacatttcaaagtttggattgtatcaagtggcatgtgctgtgaccatttataatgttagtagaaattttacaataggtgcttattctcaaagcaggaattggtggcagattttacaaaagatgtatccttccaatttggaatcttctctttgacaattcctagataaaaagatggcctttgctcgag

SEQ ID NO: 532 - DNA (cDNA), 843 bp; double-stranded, linear
gaattcggccagagaggcctacttctcttagtgatttcatgtttcaaccagtacattgtggtgaatactgaaatatcttgtttaattcagataattaaaatggtggcaaaggaagctgtttagccagagcccttcttgactttgaggaacagtggtagtataagacttgaagacagacgtgtaaaaagtactactcactggtaggctcaggtctggttgattgactgattcttgagacggaatgtcgctctgtcgcctaggcaggagtgcagtggcccagtctcggctcactgcagcctccgtctccgggtccaagcgattctcctgcctcagcctcccgagtagctgggactacaggcgcccgccaccacaccgggctaatttttgtatttttagtagagacggagtttcacaatattggtctcgaactcctgacctcaggtgatccactcgcctggcccacccaaagtgctgggattacagggatgagcccctgcgcctggcctcggttgaatttattaaacaacttttgtgggcagcaagctgtacgaggttaactatgtgatgagaagacttagaaatggagaaaagttttatcagttctacataggacttagtttgggagtttctggaaactacgttggaaatcagtagttgcacactagctgaattcagctgtgtaatttacagtgatttgttatttaccaaataagtagaagagggaattaagaagctaaaatctctgggtacttgtttgatatgaatttgttaattgtttatactcaggtaataagtgttacctcagtcatagcatttaatattttatctgactgtcctctcgag

SEQ ID NO: 533 - DNA (cDNA), 525 bp; double-stranded, linear
gaattcggccaaagaggcctacatccagaaatttagggactcagccctggtcagggtggcaaagggtctgtttgtctttccccattagacagaggtcttgtcctgctaccctaattgtaaaggggtgcctgggaaggggtggtagggacatggtggcggtggagactccggccccacttctccaggctttgctgacaggggcctgcttttaatttttatttttattccatgactttttaaaaaagaatcccgtaacttctttttcataactttttttgtaacttttcataatactgttttctactttgttcccacaagtttttttgccacaacgtttttacattttttatcccataactttttcaccccataacttttttaaataaagttatttaataaaataactttttataaaactttaataaaagttttttaattaacccataacttttttattttggtttttaataaacacttgcatagttatattacaactttgtaaaaatgaaacacattatctcaggc

SEQ ID NO: 534 - DNA (cDNA), 268 bp; double-stranded, linear
gaattcggccaaagaggcctagaaaacccttgaagacatgttgaaaatacatactcctgttagccaagaagaaagattgattttcttagactccattaagtccaaatccaaagactctgtgtgggaaaaagaaatagaaatacttatagaggaaaatgaggacctcaaacaacaatgtattcagctaaatgaagagattgaaaagcaaaggaacactttttcatttgctgaaaaaaactttgaagttaactatcaagagttacaagag

SEQ ID NO: 535 - DNA (cDNA), 224 bp; double-stranded, linear
ggcttgcacctcggcgatccccgactcccttctttatggcgtcgctcctgtgctgtgggccgaagctggccgcctgcggcatcgtcctcagcgcctggggagtgatcatgttgataatgctcggaatatttttcaatgtccattccgctgtgttgattgaggacgttcccttcacggagaaagattttgagaatggcccccagaacatagacattcctctcgag

SEQ ID NO: 536 - DNA (cDNA), 303 bp; double-stranded, linear
gaattcggccttcatggcctaccactctggccccagcgtcactggcctagggacacatgggggtggggattgtttggccttcctggcttaggtctctggaagagagaagaaccccatggggcagacccaggccacgggcagtacatgcctcccacactactgacaccgccagtgtcttctgtgaagccacctttgagcaacggaaaggaagggggatgggcaagatcagtgcaaggttggccaaaagcctggggctggccttctgctggcatgagagggccaggccgcccccagctcctcgag

SEQ ID NO: 537 - DNA (cDNA), 350 bp; double-stranded, linear
gaattcggccttcatggcctagaacaaaatctgaaattcagaaataaacaacagttggaaaatattttccatttttttccctattaaatatgataatttcaggtgcaaagagtgtttttttttttttttttttctccacagtgcttttcacggtggggactaatggatatagagggtgggaggccagaataaccaagtacctggaagtgaatctttgtggagataatgaaataattttattcgaaaggtgcaaaaggaagtcttccatcactagctcagctgttatggtccttgaactgcccttgcccgtctgtctttttattaatcctttttacctgtcgagtctcgag

SEQ ID NO: 538 - DNA (cDNA), 344 bp; double-stranded, linear
gaattcggccttcatggcctagagttgcacagatgtcttttgttagctttggtggcggagtcatcctcacagaccgttactcagataattaagtgccttgcaaatttagtatcaaatgcaccttatgatcgtctaaaactcagcctgctgaccaaagtctggaaccagataaagccttatattcgccacaaagatgttaatgttcgtgtgtcaagtctcacactcttgggagctatagtgtccacccacgcacctttacctgaagtccaactacttctgcaacagccatgttcttctggactcggtaatagcaattcagcaacccctcacctcagcccctcgag

SEQ ID NO: 539 - DNA (cDNA), 343 bp; double-stranded, linear
gaattcggccttcatggcctacaactccattaaaccaccaccagctccccaagccaccccttcagccatgaagttcctgctcctggtcttggcagccctcggattcctgacccaggtgatcccagccagtgcaggtgggtcaaaatgtgtgagtaacaccccaggatactgcaggacatgttgccactggggggagacagcattgttcatgtgcaacgcttccagaaaatgctgcatcagctactccttcctgccgaagcctgacctaccacagctcatcggtaaccactggcaatcaaggagaagaaacacacaaaggaaagacaagaagcaacccctcgag

SEQ ID NO: 540 - DNA (cDNA), 248 bp; double-stranded, linear
gcgattgaattctgaagacctctcagcctcttatgaccactcctggcaccctgtcaagcacagcatctctggtcactggccctatagccgtacagactacagctggaaaacagctctcgctgacccatcctgaaatactagttcctcaaatctcaacagaaggtggcatcagcacagaaaggaaccgagtgattgtggatgctaccactggattgatccctttgaccagtgtacccacaaatctcgag

SEQ ID NO: 541 - DNA (cDNA), 433 bp; double-stranded, linear
gaattggccttcatggcctagattgtctttataggaaatgtctttagcaaaatactacgggttctataaaacccattaacgggttatcagtgtctaggacataaatggcttctggtaagaaaattaaggtctactctccctaaatactatcataattacaaaggttaagaaaaaagaagtagagtaaaacatgtgtcccttaaaaatcaaacatgagtggtcacaaggtcctaagaagcagagaatgagaactccagttgcttgtttatctctcaggctgagcatggttggttacaatgaggggtagcaggaagagcacagccttggactccagtccaaggaactccagtctctcctgcaatttcccagtgtttgaccttgggccacttactgttcctttctcagcctccattttcatatctaaaacctcgag

SEQ ID NO: 542 - DNA (cDNA), 493 bp; double-stranded, linear
gaattcggccttcatggcctagacacgggacataaaaacttttaatgaaggaggacacagctcagagcccttccacatgcggcccaaccctgccccacggagaccggccatggcaaccgctcaatcagaaggtgttcttgatgcggccggccaccagcctaaggatgtccccgatcttcttctgccagttggcgatgtccttggacacggcgcaccacagctccccatgccgaggctctgcactctcacagcgcttcctcacctcctcctgctgctcctcagtgccatgctgcagctcaaacttgtagaagaaggcccaggcatcccccaggtccgagtcaatcttcacagtgcggtggaaccactccctggccttggtgatcttccgctgactccaaaacagcttggccacggccaggagcacatgggggtcatgctcacacttcttcagggcatccacgctcttggtcctcctctggggccttgcctcgag

SEQ ID NO: 543 - DNA (cDNA), 325 bp; double-stranded, linear
gaattcggccttcatggcctagtcagggagaagggaaggtgagaagggggggaaaaaagaagcaaaaagcccaaagaaaaaaacattttatattcatctgtataaacatatccgctaaggcaaacgcaatccgggtccgaggctgctgcgctgggctcggtgcctcctaatttctgcagattctaaggccaaaaaataaaacctctgcaagtccgcgtagcttccaggactcctgggcattttactaaaataaagagttatcgagtttaaaaagcagtgacgtcgttatgacacacactgaaagttgcataactgtggcctcgag

SEQ ID NO: 544 - DNA (cDNA), 473 bp; double-stranded, linear
gaattcggccaaagaggcctaagaattccttatgaaagtgatgcttgagtcaaaatatgatggatgaagagagtttaaatagattacatagaatttttaataatgtcgattggttatatactgggcactgatagctgatttttctttggggaaaggtatgtcagcctagtcattcagattcctttatttttttaaatgttttttcattttttgctttgcattgcattcatttgctgaagagctggcttgtactttggcaggtgtcatacttggttattctccttaggatattggcccaacaatctgggatttgtgaaaggcgcttcgcttttcagacctgggcgtctgtatcatgactatcataaatttaggattaagacacctagcctcctaccaggatgaatgaggtgtccatgtgacctgctgtgccctggaattttatacatctttctctcatagcacacggactcgag

SEQ ID NO: 545 - DNA (cDNA), 120 bp; double-stranded, linear
gaattcggccaaagaggcctagtcgagaaggaagagggaagaagaaaaactataaaagtgtgctaaatgttttattttctctggaagaatagttatattctactctttgtggctctcgag

SEQ ID NO: 546 - DNA (cDNA), 481 bp; double-stranded, linear
gctagacctgcccccttagaaatggaaaaagcatgcaagagagatgttaaaggagactattggagcaactgtgtccacaccctctgtgatagaaatggaaaaaatatccccagaagatcgtggtgagaatattgggaaacacaaagtgttacccgcagtggtagacattgagaaaatacatggaacaggactagaattgaccactaaacaaggggaggccatgcttcctgcatttgaaagtaaaacaccacaagagtatgctgaagggagtgttgaagaaacaatggaaaatacttaccaaaaggatgctgaaggggatattggaaaggctgaagtgatgcctgtgaggttagaaatggaaaatacttacccaaaggatactgaaagagacggtggcaaaactgaggtgatgccccttgcattagaggtagtaaatacttaccaaaaaaatgccaaaggttttaccgggaacaatctcgag

SEQ ID NO: 547 - DNA (cDNA), 405 bp; double-stranded, linear
gaattcggccaaagaggcctagaaacctgaggctgctgccctttatctgccttcacggtactgtccccttcccccagctcctccctgaccccatgggccaggcctcagaccttccagctaaccgcttcccatgagccactactctgatgtcagcctataaccaaaggagctggggggtccaggcctggtgaccaacctttctcagcccactcaatcagggtgctccccacctgcaggcaggaggcaacaccctatctgctaccatcagccccttccagagcccatctgccccgcccagccctgccctgcccagccataccctgctctgccccatctgggggtgccctgctcagggatgggctggcagggctgtacccagcctccctggtaagcaaagagctcgag

SEQ ID NO: 548 - DNA (cDNA), 142 bp; double-stranded, linear
gcgattgaattctagacctgcctccctgctttctaataaatctgactaaccttagacattttgtatcttactaagaacatcccttcaatatctacttcattatcccatgccatttccccactgtctcaacacgaatctcgag

SEQ ID NO: 549 - DNA (cDNA), 296 bp; double-stranded, linear
gaattcggccttcatggcctactatggtattgctaaacaagggtgggaggagagagaggtaatcagggaggacttcccacaggaggtggcatctgcagatgtctcaaaaaagaaaagaattagcctggcaagaggtgaggattgtgtagaggtcactcactttccttgtgggtggaggaaaccattccaggagctgtaggaagcttggtgctggtgaaggaggcaggagaggagagaagaggagatgaccttagaaatcacatccaagagcctctgatcccaggaggcagctcgag

SEQ ID NO: 550 - DNA (cDNA), 254 bp; double-stranded, linear
gcaggagagaaaattgaggcttaggttaagaaacttacccaaagtcaaacaatttaattggtttgggaagaccaggaagactttaagttcctaagatcgtttgagattctgcatcagggaacacttgacagcaggtttatacaaagacagatttggtatctttggagggaatgagtttccagtcattgcaggtggtccagcagagagggccactctcctttttttctttctttactccctttttgattctcgag

SEQ ID NO: 551 - DNA (cDNA), 278 bp; double-stranded, linear
aggccatgaaggccctttccatttctttttgttccatcactcttctctcaacctgtgtttctttttttactgaggagttagtccccattagttcttgtatcacattttcatttgcacgacattactcgcaggtggtggggagcctgggcttttggggaaccaggctgctctggtccccagcattgcctcctcctagcccctctagtccagtttgcctcccttaccctcattttccaaacctcttgtaccctcctctccctcccccagctggcctcgag

SEQ ID NO: 552 - DNA (cDNA), 322 bp; double-stranded, linear
gaattcggccttcatggcctatgcacttcttctttctctcctccttttgctgggtgcttaccgaggcctggcagtcctacctggctgtcattgggcggatgcgcacccgcctcgttcgcaagcgcttcctctgcctgggctggggtctgcctgccctggtggtggccgtgtctgttggctttacccgaacgaaaggatacggtacatccagctactgctggctctccctggagggcggcctgctctacgcctttgtgggccctgcagccgtcattgtcctggtgaacatgctcatcggaatcatcgtcttcagcagctcgag

SEQ ID NO: 553 - DNA (cDNA), 390 bp; double-stranded, linear
gccaaaatcaagcaaagtatgaagaaagataaagaaggggaagaaaaagggaagcgaagaggattccccagcatcctgggacccccacggagaccaanccgtcatgacaacagtgcaattggcagagccatggaactacagaaggcgcgccaccctaagcacttatccacaccctcatctgtgagtcctgaacctcaggactctgccaagttgcgccagagtgggttagcaaatgaaggaacagacgctggatacctgcctgccaattccatgtcttctgtagcttcaggggcctctttttcccaggaaggagggaaagagaatgatacaggatcaaancaagttggagaaacatcagcacctggagacaccttagatgtcaccctcgag

SEQ ID NO: 554 - DNA (cDNA), 306 bp; double-stranded, linear
gacggctacaccatgggccggctgctgcgggccgcccggctgccgccgctgctttcgccgctgctgcttctgctggttgggggagcgttcctgggtgcctgtgtggctgggtctgatgagcctggcccagagggcctcacctccacctccctgctagacctcctgctgcccactggcttggagccactggactcagaggagcctagtgagaccatgggcctgggagctgggctgggagcccctggctcaggcttccccagcgaagagaatgaagagtctcggattctgcagccaccaccactcgag

SEQ ID NO: 555 - DNA (cDNA), 327 bp; double-stranded, linear
gaattcggccttcatggcctaccctctcacgccacccccgcccccaccgggctgcaggtgctgctgatgcgctgggatctgattgaggataaaaaggaaggagagatgacccctaccccctcatcccccagttttgaaaaggtctaagcaagtgagtctggtggaggagctgagggagggagccatggaaggtgccagaaggaaggttggcgggggcacgtgtgggccgtggcttgggctggtcagagtggcgtgagctgcccggcgcctgccctgcccaagtgaccagggaagtgtgtgtgtgtccatgtgtatgcgtggctcgag

SEQ ID NO: 556 - DNA (cDNA), 272 bp; double-stranded, linear
gaattcggccttcatggcctagagaaggagccagctggggccgaatccatccgcttgaacaccaaagaagacaaaaatggtgtccccgacttagtggccctgctggctgtgagagacaccccggacgaggagccggtggacagcgacacttcggagagcgactcgcaggaaagtggggaccaagaaacagaggagttggataatcctgagttcgtggccattgtggcctataccgacccgtcggacccctgggcccggaaggagaactcgag

SEQ ID NO: 557 - DNA (cDNA), 280 bp; double-stranded, linear
gaattcggccttcatggcctatttccgatctatgtatctgtactcatacagcctcatcgggctaaacagccttcttttcagaacagtagatcactcaactgggttttcaagtgactgtttacctttcaaggctggctttataggtcttgcctcactgtatccagcaatccaaactttaccctatcccagtcaggactgcacacctcatattgaaagacataccttagaaccagactccccaaaccttacaaatatcccacccttgactcccgttctcgag

SEQ ID NO: 558 - DNA (cDNA), 474 bp; double-stranded, linear
gcaatggtctccaggatggtctctaccatgctatctggcctactgttttggctggcatctggatggactccagcatttgcttacagcccccggacccctgaccgggtctcagaagcagatatccagaggctgcttcatggtgttatggagcaattgggcattgccaggccccgagtggaatatccagctcaccaggccatgaatcttgtgggcccccagagcattgaaggtggagctcatgaaggacttcagcatttgggtccttttggcaacatccccaacatcgtggcagagttgactggagacaacattcctaaggactttagtgaggatcaggggtacccagaccctccaaatccctgtcctgttggaaaaacagcagatgatggatgtctagaaaacacccctgacactgcagagttcagtcgagagttccagttgcaccagcatctctttgatccggaaacactcgag

SEQ ID NO: 559 - DNA (cDNA), 290 bp; double-stranded, linear
gaattcggccttcatggcctaatttttttgttgttgtttcctttttgtattttactgatatcaccaggatagtttactctccttctagctttctgcttaccgcacactggataacacacacatacacacccacaaaaatgctcatgaacccaatccggagaaggttccagcaggtcccccaccctcccctcctcctcctacttctcctcttgacagcgaggacaggagggggacaaggggacacctgggcagacccgccggctctccccccaccccaccccgtcctcgag

SEQ ID NO: 560 - DNA (cDNA), 361 bp; double-stranded, linear
gtgtatgtggggggtaagtgtgtgtgtgtgcgtgtgcgtgtatgtgcacgtgttgtgtgtgtgcgcctgcacacggagagcccactcatacgtagcagaaaatcaaatggccccaaatcagaaacatggcgcatgtgagcatgccacttcttgtgtgcctgtgactgttcagaatgtacacggccctgcagctcccgaaggccagctctgctgcaacccctcctctgtccaacacagtcctcactggtgtcttttcctcttcaaatctacagcatttctgatctctgcaaacaatttaacccaaaaccaagttctggctgacaaggctacatcttgtttcttgtgcgtgattagcctcgag

SEQ ID NO: 561 - DNA (cDNA), 381 bp; double-stranded, linear; identical to SEQ ID NO: 467

SEQ ID NO: 562 - DNA (cDNA), 317 bp; double-stranded, linear
gcactcataaaaatcttactcagaaatcttcagaggtttgctaaggatacaatttgattcttacacatttaatgctcaccagctgcttaggcccacaccatttatccaccctgatttgctactgctctttgaaatacaaccagtgtttcagccagactgttttcctgcttctgctccccttctcctcctcccagcacatctgtgaattctttgactggtttaccactcccacactcctccccagcaatgcagatcttctacaccctttaggatctaagctaagtctgcttcccagatatcctcccgaacagctcgag

SEQ ID NO: 563 - DNA (cDNA), 472 bp; double-stranded, linear
gaattcgggcttcatggcctactttaatgagataggaactagtatattcaccgtctatgaggccgcctcacaggaaggctgggtgttcctcatgtacagagcaattgacagctttccccgttggcgttcctacttctatttcatcactctcattttcttcctcgcctggcttgtgaagaacgtgtttattgctgttatcattgaaacatttgcagaaatcagagtacagtttcaacaaatgtggggatcgagaagcagcactacctcaacagccaccacccagatgtttcatgaagatgctgctggaggttggcagctggtagctgtggatgtcaacaagccccagggacgcgccccagcctgcctccagaaaatgatgcggtcatccgttttccacatgttcatcctgagcatggtgaccgtggacgtgatcgtggcggctagcaactactacaaagaagaaaacctcgag

SEQ ID NO: 564 - DNA (cDNA), 411 bp; double-stranded, linear
gccgcgatgttcccccttcgggccctgtggttggtctgggcgcttctaggagtggccggatcatgcccggagccgtgcgcctgcgtggacaagtacgctcaccagttcgcggactgcgcttacaaagagttgcgtgaggtgccggaaggactgcctgccaacgtgacgacgcttagtctgtccgcgaacaagatcactgtgctgcggcgcggggccttcgccgacgtcacacaggtcacgtcgctgtggctggcgcacaatgaggtgcgcaccgtggagccaggcgcactggccgtgctgagtcagctcaagaacctcgatctgagccacaacttcatatccagctttccgtggagcgacctgcgcaacctgagcgcgctgcagctgctcaaaatgaaccaccacctcgag

SEQ ID NO: 565 - DNA (cDNA), 270 bp; double-stranded, linear
cactcagaaccctcagactttcaaagagccaggaaatcggtataaaatttttgagataacattaattaagctttttgcagtttttcctaggaccagattaaacagaagttttcctttacagtattcattatggttggtatctccagagttcatcctttttttgtggtactgggaaaagttgcaacatttacctttgcagggacatggatggagctggaggccattatctttagcaaactaacacagagccaaagacaaaaaccactcgag

SEQ ID NO: 566 - DNA (cDNA), 272 bp; double-stranded, linear
gttcctgttgactaacggctcatcttttccttgtttttgttttttttttgttctttttttccatgtcactaaaggccaaaactggaaccaaggatttaataactattatgatcaaggatatggaaattacaatagtgcctatggtggtgatcaaaactatagtggctatggcggatatgattatactgggtataactatgggaactatggatatggacagggatatgcagactacagtggccaacagagcacttatggcaaggcatctcgag

SEQ ID NO: 567 - DNA (cDNA), 306 bp; double-stranded, linear
gcaatggcaggaattcgaaatattggcatatggttcttttggattagattatataaaatcagaagaggtagaaccaggccccaagcactcctttttctctgcatgatacttctgcttattgtccttcacactagctacatgatttatagtcttgctccccaatatgttatgtatggaagccaaaattacttaatagagactaatataacttctgataatcataaaggcaattcaaccctttctgtgccaaagagatgtgatgcagaagctcctgaagatcagtgtactgttacccggacgctcgag

SEQ ID NO: 568 - DNA (cDNA), 253 bp; double-stranded, linear
ggtgtttggccacagttcgggacctatggtagaaaaatactcagtagctacccagattgtaatgggtggcgttactggctggtgtgcaggatttctgttccagaaagttggaaaacttgcagcaactgcagtaggtggtggctttcttcttcttcagattgctagtcatagtggctatgtgcagattgactggaagagagttgaaaaagatgtaaataaagcaaaaagacagattaagaaacgagctctcgag

SEQ ID NO: 569 - DNA (cDNA), 544 bp; double-stranded, linear
cacagtgctggctcacaacaagatgctcaaggtgtcagccgtactgtgtgtgtgtgcagccgcttggtgcagtcagtctctcgcagctgccgcggcggtggctgcagccggggggcggtcggacggcggtnattttctggatgataaacaatggctcaccacaatctctcagtatgacaaggaagtcggacagtggaacaaattccgagacgatgattatttccgcacttggagtccaggaaaacccttcgatcaggctttagatccagctaaggatccatgcttaaagatgaaatgtagtcgccataaagtatgcattgctcaagattctcagactgcagtctgcattagtcaccggaggcttacacacaggatgaaagaagcaggagtagaccataggcagtggaggggtcccatattatccacctgcaagcagtgcccagtggtctatcccagccctgtttgtggttcagatggtcatacctactcttttcagtgcaaactagaatatcaggcatgtgtcttaggaaaacagaatctcgag

SEQ ID NO: 570 - DNA (cDNA), 330 bp; double-stranded, linear
gaattcggcctcatggcctacattaaagaaaagcttcccacacatccatttgaagctgatctccttgagatggcagaaatgattgcagaagatgaagagaagaagactctatctcagggagagtcccaaacttctgaacacgaactctttctagacaccaagatatttgaaaaagaccaaggaagtacatacagtggtgatcttgaatcagaggcagtatctactccacatagctgggaggaagagctgaatcactatgccttaaagtcaaatgctgtgcaagaggctgattcagaattgaagcagttctcaaaaggggaaaccctcgag

SEQ ID NO: 571 - DNA (cDNA), 312 bp; double-stranded, linear
gaattcggccttcatggcctaagggaaaacattttgcatgtgtaaagcttcatgaagttctctttaaaaaataccaaagcttgtttatttctgataattaacctaagcccttatgaaaataaacaaaatgaagggattatgacaggtattaccaaaaacaccaaaaggaacaaaggggcctgcgttaaaacctaattgctaatgcttcacaactaggagagcatgccgtcttgatgtttaaaaaacccagggtctccacccttcctttgatttgtgcaattctgtcttccacagttccggagcttactcgag

SEQ ID NO: 572 - DNA (cDNA), 391 bp; double-stranded, linear
gaaaatgttcatggccgcagcaggagtagaggtcctgagcctcctatttttctgcatctactggggtcaatatgccaccgatggcattggcaacgagagtgtgaagatcttggccaagctgctcttctcctccagcttcctcatcttcctgctgatgcttatcctcctggggaagggattcacggtgacacggggccgcatcagccacgcgggctccgtgaagttgtctgtctacatgaccctgtacacgctcacccatgtggtgctgctcatctacgaggcggaattctttgacccaggccaggtactgtacacgtatgagtcgccggccggctacgggctcattggactgcaggtggcggcctacgtgtggttctgctatgctctcgag

SEQ ID NO: 573 - DNA (cDNA), 377 bp; double-stranded, linear
gaattcggcttcatggcctaaaaaaaactccagaaaaaaacaacagcgcggtggtggggttttgttaatttcgcctttttttttttttgcacgcgccacgaaattcaggctgcgtttagctcctgagaaatatccaaagtaattgcagattgcggagacgcacagcattagttcaaaaaagacccgaggcattggggcagggttaggtggagggcaccggaggctctacacaagaaaagcaggaacctgcaaacccacgtagatttccactacaaccttcccttttcttctggctagccatccagcgctctccatggcactgcatggcacaagttgcttctgatagtcttttaagtttgctaagggaactcctcgag

SEQ ID NO: 574 - DNA (cDNA), 325 bp; double-stranded, linear
gaattcggccttcatggcctacagcctcaagtcactcccaagccccctccttgtctgtgcatccgggggcagctctggagggggtttgctggggaactggcgccatcgccgggactccagaaccgcagaagcctccccagctcacccctggaggacggccggctctctatagcaccagggctcacgtgggaacccccctcccaccctcgcgagtctgtttccaaggaggagaaggagcagaactatgacttaactgaagtctcagagagcatgaaagctttcatatccaaagtctcaacccacaagggagcagagctgcctcgag

SEQ ID NO: 575 - DNA (cDNA), 438 bp; double-stranded, linear
gaattcggccttcatggcctactcagcctccctaatagctgggattacaagcgtgagccaccacaccccgctgggaaatatcttaaaagaatcaaaataagaaagttactctacttaaatcgtgtgctttttctgtgtgtgatttatggtaatcttaccatggggtatctgattactttagaaagatccatttagcttatttttttcttctttgggttatttttttcttccttccatttgcacagcctccccccaaataaaaaataaagatataaagtctatcttctccctcttgtcagtttaagtaaaaagaacttttgcttccattttaataatagaatttgtgtgtatataatataggcagtgatttggcctcaagctgagtttagatttgaaaagatgagaatattaaagcttgtcagccagcccactctcgag

SEQ ID NO: 576 - DNA (cDNA), 510 bp; double-stranded, linear
gaattcggccttcatggcctactgtnttccataaaggctgtactaatttccattctcaccaacagttcactagggttcccttttctccacattgttgccaacattctttatcttgtgtttnttaataacagctatcctaacaggtatgaggtgatctctctcattgcggttttgatttgcatttccctaacggttggtgatactgagcatttttgcatacaccgggtcatttgttctttgttgttgacttgagtcccttatatagtttggatactgctgtggcctgaatgtttgtgtcccccaaaaattcgtatattgaactctcatccctaaggtcaacagtttagggaagcgattaggtcctgaggactctgccctcttgcatagaattagtgctcttataaaagatgcccgagggagctcttttgcccctcctgccatgtgaggacacagctagaagctaccatctgtgaaccaggaagcccccctcaccagacactgtatctcgag

SEQ ID NO: 577 - DNA (cDNA), 276 bp; double-stranded, linear
gaattcggccttcatggcctaaaaaataaaaataaaatatacaaccaaaggcagtattcacagaggtatttcttgggaataaaagaaggaatatagtcattccttggtattctctttggtgtccagagttacttaaaaattcttggtgtttattgccttttagtcacagggatacaccttttattcatttatttatttatttaccagtctcatttagcagtaggaatgcatcttagcatttttatactgctgctcaacacagtgctttcactcgag

SEQ ID NO: 578 - DNA (cDNA), 262 bp; double-stranded, linear
gaattcggccttcatggcctaaatccttccagatgtcctgtgaaaatgtttgaatgctacttgtctaaaagtccacagaatcttaatcagaggatggatgttttttatttgcaaccagaatgctctagttctacagatagccctgtctggtatacgtctacttcactggaccgaaacaccttggaaaatatgcttgtacgggttcttctagtaaaagatatttatgataaagacaattatgaactggaggaagacactcgag

SEQ ID NO: 579 - DNA (cDNA), 439 bp; double-stranded, linear
gaattcggccttcatggcctaatttaggaccatttaagagagtttgactaagaaagagctgtttgaaacctcctggcttatgtatttttaggggtgtggtgatcgaggctttctcctctgagtagagtttgtgcatttgcagtataagattatcattatcaaacattcctactaggcctttctcctcagcccctaaaaaaatatgtatagtaatgaagtaggaagatcatgtttatatttgacttcacaaattcctcaggctaagttgctttctactggggtgtggctggagacaaaaattacaggtaagacttgacttaatttttgatagggaggttcttaagaggctttttcggaatcactcacctcgcccacttccatgcagggatgtggtgagagcccttcagtctacttaggaaaacctggcacatgactcgag

SEQ ID NO: 580 - DNA (cDNA), 346 bp; double-stranded, linear
gaattcggccttcatggcctagatattctcagggtcatcaagactcctgagatagcaaacttggccttgcttggctttggagatatctttgccctgctgtttgacaaccgctacctgtacatcatggacttgcggacagagagcctgattagtcgctggcctctgccagagtacaggaaatcaaagagaggctcaagcttcctggcaggcgaagcatcctggctgaatggactggatgggcacaatgacacgggcttggtctttgccaccagcatgcctgaccacagtattcacctggtgttgtggaaggagcacggctgacaccatgagccaccagccgctcgag

SEQ ID NO: 581 - DNA (cDNA), 740 bp; double-stranded, linear
gaattcggccttcatggcctagacctgcctcgagattgccatcttggttttggtgggtttcggccgacttctttgccacttgctattttattttctaggtctttgtgccccgtattgtgtgctgaactccngtctcatcctgtgactaagattgcctaacctcctgggaatgcagcccagtagatctcagccttactttacctaaccccttttcaagatggagtcactctggttcaaacacctctgacattcgcagtggaatccattaaaagatgttaaggagatatgattatatttctaaattgtcactccagcatcccctacgccagacattatgccagtctctatccatacagtatctcatttaatcctcccgtcattaatctcattttaccaatgagtaaacttgaagcaaatgagtgactttctcaaggctacctacttacgccttaccagggccaggattcaaacctagacttgttcagcgacagaacacacacttaaccatcacccacttaggccatgaaggccggccttcatggcctaaactgctgttattttggattatatggagttatgaaaatctaaatgttttacaaagttaaaaagtattctttttttgctcacttataactcaaaaatcactaaagtcattctgctaaacatgccacgaagccaagcttcttgccatatgtctgcataattttattaaatcactgctattgacgtgcaacctcgag

SEQ ID NO: 582 - DNA (cDNA), 491 bp; double-stranded, linear
gaattcggctttcatggcctacaaaggggtagcaaggcatgtcttacatggtggcagcagagagagagagcagggaaaactgtcatttataaaaccatcagatcagttgggttgtgcaaatggtggagaagaaaacttcaggaagagtgcatagactgagcagagaagaggaccagctacctccgtagaggcagggagagcagccaagctggagcctgagcagcattgctggacatggagaaggtctggaatcttgtcaaggaagcaagcaaagggtttctttctattcaatgaagtccactcccaggaccctgggcagcaacgggtgctggactgggccacctggcagcgtcacatcaactggcagctagaagtcctggagaatgacaacttccaggacgacccccatgtgggactccctcagctcagcaagagactgccacagttcgatgatgatgcagacaccagacagtaaaagaagaaaactcgag

SEQ ID NO: 583 - DNA (cDNA), 566 bp; double-stranded, linear
gaattcggccaaagaggcctaaacagtccagagaggcataaatcagacccagttcctagctggcttgtccttatcaagtaaatggaaaaggggccaggccaaagcagggcaagatgaccttggacttgggagagacttggactcatgccacaatcctagggtgcccactggaccattgcttttctgagttttgtagtcattcggtgtctgaagtaaggtagattgaagtgaggccttcggtttccatctggaccctttctctcctgttttctttttttccgccttgtcctagggatgttcaatagcccagaaatgcaagccctcctccagcagatctctgagaacccccagctgatgcagaatgtgatctcagcaccctacatgcgcagcatgatgcagacgcttgcccagaaccccgactttgctgctcagatgatggtgaatgtgccgctcttcgcggggaacccccaactgcaggagcagatccgcctgcagctcccagtcttcctgcagcagatgcagaacccagagtcactctccatccttaccaatccccatacctcgag

SEQ ID NO: 584 - DNA (cDNA), 482 bp; double-stranded, linear
gaattcggccttcatggcctagttgaaaatgatcattacacaatatattcctaaacataaactgagtaaacttgaaacagctcactgtgtggagaggaccattcccgttttgctcaccagaactggagattcttctgcccgcctccgcgtcacagctgcaaattttattcaggaaatggccttgtttaaagaagttaagtctctccaaattattccatcctacctggtgcagccattgaaagcaaactcttcagttcacctggcaatgagtcagatgggcctcctggcccggctgctgaaagacctgggcactggcagctcgggcttcaccattgacaacgtgatgaagttttcagtgagtgccctggagcatagagtgtatgaggtccgcgagacggcggttcgaattattttggacatgtacagacagcaccaggcttccatcctggagtaccttcctccagacgacagctaatctcgag

SEQ ID NO: 585 - DNA (cDNA), 265 bp; double-stranded, linear
gaattcggccaaagaggcctaataaaggtgtggaaacttcattcattcatatcttcaacacaaattgtaggtagcctgttttttaaaacatttattcaacaaatatttagtccaagccactattacttactaccttctctactattgtatggacttttaactatctctgacactattcactattcttccacattctctattatttatacctatggtaaaatttgccagtttgaccatacaactaatactcacagggacactcgag

SEQ ID NO: 586 - DNA (cDNA), 120 bp; double-stranded, linear
gaattcggccaaagaggcctactcgagtttggtgctttatttagcaagtgagtaaaaatattggaatatttaagtatttgcataaaaaatcaaatggtagtgttttgtaatctctactgt

SEQ ID NO: 587 - DNA (cDNA), 503 bp; double-stranded, linear
gaattcggccaaagaggcctactcgagtcaggtctagaattcaatcgacggtttaggaaaaagacaatttaagagaagaactaaagaaaagaacagaaactgagaagcagcatatgaacacaattaaacagttagaatcaagaatagaagaacttaataaagaagttaaagcttccagagatcaactaatagctcaagacgttacagctaaaaatgcagttcagcagttacacaaagagatggcccaacggatggaacaggccaacaagaaatgtgaagaggcacgccaagaaaaagaagcaatggtaatgaaatatgtaagaggtgagaaggaatctttagatcttcgaaaggaaaaagagacacttgagaaaaaacttagagatgcaaataaggaacttgagaaaaacactaacaaaattaagcagctttctcaggagaaaggacggttgcaccagctgtatgaaactaaggaaggcgaaacgactagactcactctcgag

SEQ ID NO: 588 - DNA (cDNA), 567 bp; double-stranded, linear
gccactatggtaccaaaacctcagtcttcacatagtcaaacttggacacaaacagcacctcccacaaacattcttatcctcatcccagcattggttactgaccacacactctagcaggtcactcaagcgctaatgctgggaaggacctctgaatacttctctttgtcttgtgccacacagccagggtcaccaaagcctgttaatgctacctccaaaaaaggcaaatctgacccctcttcctcaaaacccagccacatagtaagttcaaggattcagtcacaggtctgccttagtgcactagccctataacagtaaactattcacttcccctccagtcccttgccccctttcaagcaatttcctgtactgccaagggaattacttttctaaaattagctaagaaacttttgatggtatcttactgtcccaaaaataaattttaattccttctttagcatggtataaaaaggacacaacagagtttggtctagtgtccttttaaagacactagatttctcatcaccataccgcatgtaccctatacgacttatcaattccctactcgag

SEQ ID NO: 589 - DNA (cDNA), 138 bp; double-stranded, linear
gaattcggccaaagaggcctaggcatggtgagttttgatcttcttccccttcttttcttccccttcttctttccttctttgatcttcttccccttcttttcttccccttccccttcttttcaatttctcccacgtcaa

SEQ ID NO: 590 - DNA (cDNA), 420 bp; double-stranded, linear
gaattcggccaaagaggcctagagagaatggaaaagataaggaacagaaacaaacaaataccgataaagaaaaaaataaaagagaaagggagcttctctgacacaggcttgggtgatggaaaaatgaaatctgattcttttgctcccaaaactgattctgagaagccttttcggggcagtcagtctcccaaaaggtataagctccgagatgactttgagaagaagatggctgacttccacaaggaggagatggatgatcaagataaggacaaagctaagggaagaaaggaatctgagtttgatgatgaacccaaatttatgtctaaagtcataggtgcaaacaaaaaccaggaggaggagaagtcaggcaaatgggagggcctggtatatgcacctccaggaaaggaaaaaccgaggcag

SEQ ID NO: 591 - DNA (cDNA), 611 bp; double-stranded, linear
gaattcggccaaagaggcctacattgcttttcaaataacttaaaataacacgttatgtgccatgtggctactttagtaatattgccaagaagagcacagtttttacactagtggcatctcagtgaaattaaccaaagatgaagctttggctttgctggtgagatcagagccctcctgagcaggcagcgccactccagggttcagacagggctgcacaggcggcagagatacagggtctgagggctgagacgccatggggccgctgctgcttatgtggttggattgtttacaagcctcattattaaaactgaaggcatttttttttttctgctgcctttcccaaagtggttaggtttggaaaagagatgatgatggtaatatttatttgtgctttttaagccatttccccaaatgggactagcatgcttgttttcagtataccgtggcctgcctcatgatggtttggagatactgtctgtggatgtgaggtggggacttcattcattgtcctatttctatctncactttgtgcctggagagctttcaggggaggtggaggaggagggtctgccaagctactgcaacatctgtcacccactanacccagacct

SEQ ID NO: 592 - DNA (cDNA), 443 bp; double-stranded, linear
gaattcggccaaagaggcctaattgaattctagacctgcctgaaacctgtccctcctaggaaattgaatagcttgagttacgaaggaactgcatgggacagactgagttttgttcctctcttccctggaagctggatgtcctttacagctttgcccagtatgtcatgtggcccctgaagtacataatccagagtggactgcctttcagggtccctcagctgtgaaagtggagcattcatatcaagactacatctttcctgttcagctttcttcagccttggaggaaccacacacaatggatccaagacttctgtcccttgctaattatctataagaagtaaacccatttcacataacttgtgaatatgttttctttcactggattttggcaaataggtacccagtgcatggtggacctacacagttaggcctctttggccgaa

SEQ ID NO: 593 - DNA (cDNA), 441 bp; double-stranded, linear
gaattcggccaaagaggcctaaaagcattcagtattggtaaaatgagtacagctaancgaactttaagtnaaaaggagcaggaagaattaaagaaaaaggaggatgaaaaggcagctgctgagatttatgaggagtttcttgctgcttttgaaggaagtgatggtaataaagtgaaaacatttgtgcgagggggtgttgttaatgcagctaaagaagaacatgaaacagatgaaaaaagaggtaaaatctataagccatcttcaagatttgcagatcaaaaaaatcctccaaatcagtcttccaatgaaagaccaccatctcttcttgtgatagaaaccaaaaaacctccacttaaaaaaggagagaaagaaaagaaaaaaagcaatttggaactcttcaaagaagaattaaagcaaattcaagaggaacgtcgactcgag

SEQ ID NO: 594 - DNA (cDNA), 562 bp; double-stranded, linear
gaattcggccaaagaggcctaagaaaacctagctaataaagaaaaagctgttgctcaaatgaagataatgatctcagagtgtgaatcatctgtgaaccagctgaaagaaacattggttaatcgagatcgtgagataaacagcctccggcgccagcttgatgcagctcacaaagaactcgatgaagtaggaagatctagagaaatcgcttttaaggaaaacagaagactgcaagatgacctggctacaatggcaagagaaaatcaagaaatctcattggaattggaagcagcagtgcaagaaaaagaagaaatgaagagcagagttcataaatacataacagaggtgtcacgatgggagagcttaatggctgccaaggaaaaagaaaatcaagatttgttagatagatttcagatgcttcataaccgtgctgaagactgggaggtcaaagcccatcaagctgagggagaaagcagctcagttcgactggaacttctttctattgacactgagaggagacatcttcgggaaagagtggagctattagaaaaagaaaatctcgag

SEQ ID NO: 595 - DNA (cDNA), 426 bp; double-stranded, linear
ggaagagcagaatttggtggcttatcctcatgatggaaaaatctttttctgcacctcacaagatatccctcctgaaaatgaactgcttttttattatagccgagattatgctcaacagattggtgttcctgaacacccagatgtgcatctctgtaactgtggcaaggagtgcaattcttacacagagttcaaagcccatctgaccagccacatccataaccatcttcctacccagggacatagcggcagccatgggccaagtcacagcaaagaaaggaagtggaagtgctcaatgtgcccccaagcttttatctctccttccaaacttcatgtccactttatgggtcacatgggtatgaagccccacaagtgtgatttctgtagcaaggcttttagtgatcccagcaacctgcgaacccactcgag

SEQ ID NO: 596 - DNA (cDNA), 328 bp; double-stranded, linear
gaaaaatcagtcgactgaatgacaccatcaaatctttgaaacaacagaagaaacaagtggaacatcagctggaagaagaaaagaaagcaaacaatgagaaacagaaagctgaaagggagctagagggtcaaatccagagattgaacacagagaaaaagaaactaaatacggacctgtatcacatgaaacattctctcagatactttgaagaagagtccaaggatctggccggccgcctgcaacgttcatcgcagcgtataggagagttagagtggtctctctgtgctgtcgccgccacacagaagaagaagccggatgggttctcgag

SEQ ID NO: 597 - DNA (cDNA), 529 bp; double-stranded, linear
gagaagtgcgagaggggccagtgttgttgttacctgaaaggtaagtgcagcccacaaaaatgcagtgaagaagaagatatatgcatatgtttaagttaatacaattgagatacatttagcagacagaatcaatagagttgatgagtgactgactggatgtgtggggagtttatatcactcccaggtttttgacttgggccaccgggcactcaagaaggaaaaagaggatccagggagaggaacttttctgaggactggggtagggctgaacagctgcattcgagactggtggagggtgggctgggcatgggatgcacaaatggaaattccactgggtctgcagctcacacataggcatgaccagcatagagatagagaggccccagtgctgctgagtaactgtgattccccaggtgatggcatcagctgagaagggaaggaagcccatgtgaggacactgaagaaggagtgagcagacaataagaagcccacagaagacagagaaggaacaactagaaggaggctcgag

SEQ ID NO: 598 - DNA (cDNA), 454 bp; double-stranded, linear
gaaaaagatgaaatctgatggattaggagcatctggacattcgtcaagtaccaatagaaatagtataaataaaactctgaagcaagatgatgtaaaggaaaaagatggtacaaaaatagcatctaagattacaaaagaacttaaaactgggggaaaaaatgtttctggaaagcccaaaactgtaacaaaatccaaaacagaaaatggtgataaggcacggttggaaaacatgtcacctagacaagttgtagaaagatcagcaacagcagcagcagcagcaactggacagaagaatttactaaatggaaaaggagtgagaaatcaggaagggcaaatttcaggtgccagacccaaggtactcacaggaaacttaaatgtgcaagccaaagcaaagcctttgaagaaagctacagggaaggattcaccatgcctcagcatcgcagaacccctcgag

SEQ ID NO: 599 - DNA (cDNA), 411 bp; double-stranded, linear
gaattcggccttcatggcctaggtcctcaagcattgcttcaatatcaatatcgtctgccattttctctaaacgcctgttccggccttcgggcgcctgtggtgctcgtgttcgggaagagattgctgctgctgctgctgctgctgccgccgccgccgcttctgttgctactgttaagcccctaggcccaggccgcggaaccgcccagcccgaatatcgggttccaaggacggctaggcccgagagaatctaaaaaaaacaatggaattagagaagcccacgcgggagagcaggacggcggcttcggcagctcaggatccaccccngcgacagcgtcgacaagttccctgaaatggcggccgctgcttccctgtactcanantccaccccccgaattctagacctgcctcgag

SEQ ID NO: 600 - DNA (cDNA), 306 bp; double-stranded, linear
gaattcggccttcatggcctaattaagcctgcctacttctacaatgcattctgttacctatttgaacagtatgtttgtaactatggcaatgaagtcagtagataggaaaccagttattccttctacctttaaaaattttgagaacttgccaaccagggactaaagctattatcttgaacagagtccctaaagctagtctagtttttgccacatctgcaatgattattgtttaatttcaaaagaatcctcaggctctacaatctaggggtggtaaatgtgtttccactatacttgggaccgctcgag

SEQ ID NO: 601 - DNA (cDNA), 443 bp; double-stranded, linear
gaattcggccttcatggcctaggaatctcctcttaaaccaggtgaagtgggaaagcagggaccataccaccctgagtgacatctacctgaataatatcattcctcgatttgtacaagtcagcgaggactcaggaagactctttaaaaagagtaaagaagtcggccagcagctccaagatgatttgatgaaggtcctgaacgagctctactcggtcatgaagacatatcacatgtacaatgccgacagcatcagtgctcagagcaaactaaaggaggcggagaagcaggaggagaagcaaattggtaaatcggtaaagcaggaggaccggcagaccccatgctcccctgactccacggccaacgttcgcattgaggagaaacatgtccggaggagctcagtgaagaagattgagaagatgaaggagaagcaccaagccctcgag

SEQ ID NO: 602 - DNA (cDNA), 585 bp; double-stranded, linear
gaattcggcttcatggcctacaacatgtcagttttttttttcattttcctcaatatttttcttctngctttctcttctcctggttcccagcctctactcaatagtccccccagctttgtgtgctggtctcggggcttcatggagatgaatgggcggggggagttggtggagtcactcaagagattctgtgcttccacgaggcttccccccactcctctgctgctattccctgaggaagaggccaccaatggccgggaggggctcctgcgcttcagttcctggccattttctatccaagatgtggtacaacctcttaccctgcaagttcagagacccctggtctctgtgacggtgtcagatgcctcctgggtctcagaactgctgtggtcacttttcgtccctttcacggtgtatcaagtaaggtggcttcgtcctgttcatcgccaactaggggaagcgaatgaggagtttgcactccgtgtacaacagctggtggccaaggaattgggccagacagggacacggctcactccagctgacaaagcagagcacatgaagcgacaaagacaccccacacatctcgag

SEQ ID NO: 603 - DNA (cDNA), 368 bp; double-stranded, linear
gaattcggccttcatggcctagtctggtagtaaggtggagtgggtttggggctaggtttagctcgggggaggtggtgttgggggccgcaggctgcgcggtgcctgggtacatctccaggcccacgccccgggcttgggaagtcacatccatgtctctgcgccgtgcagctttcaagatttgccgaaaggctcccagagctctgttttaaatggtgaatccatctttagaaagaagcgtgattctccttgaagtgagcctggcatttgtcagacaggaaactccccaggaggagcacctgtggtggtttgggttgggtttgttaactgcagagagtgggaagaacagatgctcctcacaccgtctcgag

SEQ ID NO: 604 - DNA (cDNA), 604 bp; double-stranded, linear
gaattcggccttcatggcctaggaaagaccatcagcctgggagtcagtgaacctgactctgatcccagctctgcctccantcagctgtgtgatgacaggtaggtcaccttccctctctgagccacagtttatctgtctgtaaacaggggtattggactggattctctgttatctctcatgtctctgtgaaaggtctgtgttttcaaatactccttagggacatgacctcacatagaaagagggggtgccacgaactggattcccagcactcccccttcccagctctgctcaagctgagggaccttggaacatggtacttggacctaagtactctctctgggcttcagtgtccccagctataaaatgggggaaatgcctaactcaggaggttgaggtaaggacaaaaggaattaatacatggaaagtgcctggaacagtgcctggcacagtctgctttcagaaaaagctgcaaggtggctactctcagcagatataagttaatgcaggaacagcaactagcagctcttggacatgcaatatattatatattttttgcatcttttacccttcacggcactgagcctcacaatccgttgacctcgag

SEQ ID NO: 605 - DNA (cDNA), 495 bp; double-stranded, linear
gcgcagccagcgcctgcctccgactcgactccacacctgcttgctacagcgggtgaggaagcaggaaagggggagggagggatgtcgtctggattcctgtaataatttgtttcattgtttccaatcgacttagtcaccaggttaaatagtagcatagacctttcaaaaaagtagctagcttataagtagatgtattgaaaacacctgcttgttgagtcgtagacaattcctcatttactgtgtgaactctagggggtgaaacacgggcggagagcggctgtgagctcacgcggctccatccccacagcggcccagggtcactcggggccattaatcaggccgcagagctgccctctgagccgggccgccagcgcccacagggcccagaccagggctccctgggcgggatgttttaaatcgcacagggacaaaggaaaggaaagacgctggggcccaagcccgagcttatgaaacgttatcaaggagcgactcgag

SEQ ID NO: 606 - DNA (cDNA), 331 bp; double-stranded, linear
gaattcggcttcatggcctagacttccaaggacatgcttcgaactctggcccaagccaagaaggaatgctgggatcggttcctccaggagaagttagcttcagagttctttgtggatggacttgattctgatgagaggtgactacaattgcaaagtagaatttgctttgacacctgatgccaggacaatagtatgttaccatccttctatagacattccatatgaacgcacaaaacctatcccttgaccagatcctgtgtataataatgaagaaacacatggtcaagtgctgaaaactagagaagaaaaaagtgaacacctggagctcgag

SEQ ID NO: 607 - DNA (cDNA), 632 bp; double-stranded, linear
gaattcggccttcatggcctactgcctcggcctcccgagtagctgggaccacagacgcccaccaccatgcccggctaaatttttgtatttttagtagagacgggtttcaccgtgttagccaggatggtctcgttctcccgacctcgtgatccgcccgcctcggcctcccaaagtgctgggattacaggcgtgagccaactcgcccggccaggaatccctcctctgtctgacctaactgccctctgccctggagctgctcagcctctatcaatttttctggctctcagcgaacgttttcattcagttgcaagacacagaaactcaaattcaaacctgcttacacaaaatagtgaatgtactggctcatgcactttttaaagagatgaggtctgttgtgctgcccaggctggatgtgaactcccgggcccaagaaattctcctgcctcagtctcctgagtagctgggaccacaggagcatgactgtaagtcctggtgtgaatcaggctccagaaacagcttgatcctggttcccaacagtatggtcaaaactcattctctcttctgtcttcttctctatgacaggtgctccctaagaagtgacaaagaaggccactaacagctctgggctcgag

SEQ ID NO: 608 - DNA (cDNA), 531 bp; double-stranded, linear
gtatngntgaaaataagaaaaaatatttctgaaattcgggaacttgagaacatagaagaacaccagtctgtagatattgcaactttggaagatgaagctcaggaaaataaaagcaaaatgaaaatggttgaggaacatatggagcaacaaaaagaaaatatggagcatcttaaaagtctgaaaatagaagcagaaaataagtatgatgcaattaaattcaaaattaatcaactatcggagctagcagacccacttaaggatgaattaaaccttgctgattctgaagtggataaccaaaaacgagggaaacgacattatgaagaaaaacaaaaagaacacttggataccttaaataaaaagaaacgagaactggatatgaaagagaaagaactagaggagaaaatgtcacaagcaagacaaatctgcccagagcgtatagaagtagaaaaatctgcatcaattttggacaaagaaattaatcgattaaggcagaagatacaggtagaacatgctagtcaaggagacctcgag

SEQ ID NO: 609 - DNA (cDNA), 330 bp; double-stranded, linear
gtgactttggaaccttgagagttagatgaataaatcagaaaaatggaattaaatgtatctactttattattggtaaatctggttaggatgtgcagccctaatcaggcttccttaattccttctccactgagtctggaccagcactctccagtagaactttctatgatgacggaaatcctctgtgtctgcgctgatcagtgtggtagttactggccacatgtggctgttgagtacttgaaatgtggccagtgtggtgatggaattgtgtttttaatcttatttaatttaaatttaaatagccaaatgtggctagtggctgttgtactcgag

SEQ ID NO: 610 - DNA (cDNA), 345 bp; double-stranded, linear
gtggaggctttcttgatcatggatggtgaagatataccagatttttcaagtttaaaggaggaaactgcttattggaaggaactttccttgaagtataagcaaagcttccaggaagctcgggatgagctagttgaattccaggaaggaagcagagaattagaagcagagttggaggcacaattagtacaggctgaacaaagaaatagagacttgcaggctgataaccaaagactgaaatatgaagtggaggcattaaaggagaagctagagcatcaatatgcacagagctataagcaggtctcagtgttagaagatgatttaagtcagactcgggccgaactcgag

SEQ ID NO: 611 - DNA (cDNA), 633 bp; double-stranded, linear
gaattcggccttcatggcctaaatgaccanatcgagagggaggactatgaggactttgagtacattcggcgccagaagcaacccaggccacccccaagcagaaggaggaggcccgagcgggtctggccagagccccctgaggagaaggccccggccccagccccggaagagaggattgagcctcctgtgaacctctgctgcccccgctgccccctgactatggtgatggttacgtgatccccaactacgatgacatggactattactttgggcctcctccgccccagaagcccgatgctgagcgccagacggacgaagagaaggaggagctgaagaaacccaaaaaggaggacagcagccccaaggaggagaccgacaagtgggcagtggagaagggcaaggaccacaaagagccccgaaagggcgaggagttggaggaggagtggacgcctacggagaaagtcaagtgtccccccattgggatggagtcacaccgtattgaggacaaccagatccgagcctcctccatgctgcgccacggcctgggggcacagcgcggccggctcaacatgcagaccggtgccactgaggacgactactatgatggtgcgtggtgtgccgaggtcactcgag

SEQ ID NO: 612 - DNA (cDNA), 296 bp; double-stranded, linear
aaatactagagataaagtagattcatggcttggtaaggaaattttaagcattccttcaaagattgacgtgctaaaataagcattgatgttttgagtttttttacacctaggatttttagcttgggtgtgtaggtgaaggccaagactctctgcaggaaaaagcttattttcaaactcagaaaataaaatgtcaatcataaaaatctacttcaactttagcaaaaagaaaaaaaaaatcaacaaaaagtatactctgtatgctgggattccgaggttccaacacactgttactcgag

SEQ ID NO: 613 - DNA (cDNA), 268 bp; double-stranded, linear
gatccagtgctgcagcttccttactatgaaatgacagctccacttcctaatagtgcatccgtgtcttcctcactgaatcatgttccagatcttgaggctggacccagctcatataaatggactcaccaacaaccaagtgactctgacctttatcagatgacagctccacttcctaatagtgcatccgtgtcttcctcactgaatcatgttccagatcttgaggctggacccagctcatatataatggactcgccaacaacccctcgag

SEQ ID NO: 614 - DNA (cDNA), 272 bp; double-stranded, linear
ggtggaaactatccaagaggccttctgaattcctctgacatatatttgagaaactgggctactgaaagccctaaccccacttggctgcattttatttggtaaccagtgaggcaaacacccttgccagacccctaccatccatcttgatgtggttcctgcactggacactgcttgggtacgggcctgcccagatcttgggaatgtgggcagtggctcctctgaagcaccagtgggcagaggatgagtcatggtatcctcccggcaccctcgag

SEQ ID NO: 615 - DNA (cDNA), 521 bp; double-stranded, linear
gaattcggccttcatggcctagtatttttgtagagacggggcttcagcatattggccaggctggtcatgaactcctgacctcaggtgatcctcctgcctcagcctcccaaagtgctgggattacaggcatgaaccactgcacccagtcaagggtataaaatttctacacagcacaggcagattctggctgtggaagaccccaagattctttggaattgtgatgctttatttaatttagagattatcttctctgtcccactcttccccttcctaaaaaggactagatgcttgctgcttaattagtaaagcaaatttaagataattttctgctttgagatttagggatagattttttaacatagtcttgctgataatgatagacatcctgggatgttggaaattaggaaacttgaacttttatttgcacagactgagaattatgactgaggaaaagttagaggatcagaaaaaataaatttataaatcacaagctaggcttggcaatatgagtggcgctcgag

SEQ ID NO: 616 - DNA (cDNA), 577 bp; double-stranded, linear
gaattcggccttcatggcctagattggaaggtgtggtaggcagaattctggcccccatgactgccccttcccctcacaccccccgggttgctccaatggttatgtcacgttgcttggcaaaagggactttgtagatgtcataaaaggtgactaatcagctgacttgagagagtttatcctggattatccaaggggcccagtgtaattccaagagccctcaagagcagagctggagagatgccgcgcaggaggcctgggtgccgtttcggagcaggatggaaggcggtgaatcccgcctccagcatggagctcgggagaggccctgactgcagatggagaggctgccctggccgcagcgcacggggctcctgacccacaaaaatcgcgagataatgagttcatgttgtttgaaagtccgtcatttctggtaatttgctatataaaactattgctatacgattaaaaactaatacagaagaatatttctttaacattatgttaaaaaggaaaaaagctaacattttctttatagcaaaacactgccatgatttacattaaaattaggaacatactcgag

SEQ ID NO: 617 - DNA (cDNA), 269 bp; double-stranded, linear
gaattcggccttcatggcctagcacatacagtataaaaaataatcacccaccataattataccaaattcctcttatcaactgcatactaagtgttttcaatacaattttttccgtataaaaatactgggaaaaattgataaataacaggtaagagaaagatatttctaggcaattactaggatcatttggaaaaagtgagtactgtggatatttaaaatatcacagtaacaagatcatgcttgttcctacagtattgcgggccctcgag

SEQ ID NO: 618 - DNA (cDNA), 469 bp; double-stranded, linear
gaattcggccttcatggattctgctttgaatatagctacagaaataaaggatggactacaatgtgggacagtgtcttctcagaaacaaccagccttgaaggctacaactgacgaggaagattctgtttcgaatatagccacagaaataaaggatggagaaaaatctgggacagtgtcttctcagaaacaaccagccttgaaggctacaactgacgaggaagattctgttttgaatatagccacagaaataaaggatggagaaaaatctgagacagtgtcttctcagaaacaaccagccttgaaggctacaactgacgaggaagattctgtttcgattatagccacagaaataaaggacggagaaaaatctgggacagtgtcttctcggaaaaaaccagccttgaaggctacaagtgatgagaaagattctttttcgaatataaccagagaaaaaaaggatggactcgag

SEQ ID NO: 619 - DNA (cDNA), 448 bp; double-stranded, linear
gaattcggccttcatggcctagtccgtgttgtggtcagtgtgtgaactccacactggacagtagctgagtttgggcagggatgaggagtggaggggtgaggtctaaggttcagaaaaagtttgtgtttaagaacttggttacactggagtcagttgcagaccagaatggagaaaagcactcctgacttgagttgggtgtgcttgggactggatcacctttgaccttctttatttacctaattggagggaagagcaggggaggcaacactatttctcttgggtgttagaagaagattcgagcttatttgggcactggtctctatctttgccttcagctgaatcaacatctaagatgttttagatgcttagctaattcctcttaaaaaaagaataagcagaggccggacgtggtggctcatagctgtaatcccagcagtgtggtctcgag

SEQ ID NO: 620 - DNA (cDNA), 457 bp; double-stranded, linear
gaattcggncttcatggcctacttaaatccatcaagttacacaatcgatctgttgtcagctgaacagaaccacattaaatttaagccaaacacaccaataggaatgttggaggtagagaaggtaattttaaagccaaaaatgttggataagaaaaaacctacacctataataccagagaaaactgtgagagtagtgattaattttaagaaaacacagaagaccatagtgagagtgagtccacatgcatcgcttcaagagcttgcccctattatatgtagcaaatgtgagtttgatccgttgcatacactattgttgaaagattatcaatcgcaggagcctcttgacttgacaaaatctcttaatgacctgggactaagagaattatatgcgatggatgtcaacagagagtcctgccaaatatcacaaaacctagatattatgaaggaggccctcgag

SEQ ID NO: 621 - DNA (cDNA), 287 bp; double-stranded, linear
gaattcggccttcatggcctactctctgatttacagattgctaattaaatggctattattagtttggattaattagacttaagaaaacaactaactgagggttttttttgtttgttttttgagggttttctttgcatgagaattgtatgtaaccagtgatatgattattcctgaatgtacagacagaagtaagcctggacattgttaaatagtccctgctttaagggactacgataatgtgtactatgacaaacgtgctttattcttctaacgcagtaagtctcgag

SEQ ID NO: 622 - DNA (cDNA), 328 bp; double-stranded, linear
gaattcggccttcatggcctagtaggtgtatcacagatttctaatgtagaatggtcagtccaggagtaattgtaattgtggaaaaatggagaattataaaacaagaatgatgtgcaaaaaaggacacagttgaattcatctgtgttcctctaaactatttcatttactcattcatccaagttttgaaaaatgttgggagtctgaaaaattccaggcactctggataaatgagtatggaagaatcctccaaaagaacttttagtctacaggggaacattaataagcaatcagggacttgagacctacagtgctgtggaagattctcgag

SEQ ID NO: 623 - DNA (cDNA), 375 bp; double-stranded, linear
gaattcggccttcatggcctaggacgtttgggttgtttccatctcaaataaataaataaataaaagtctataaaaacagctgggcccaggcatttaaaaaaatgttcggtcttctagtttagtcttttattgtctatgcaaattctttggctattgaactatccaagctttctctttttaagcttttggggaataggttgcaatacatttcttgtctactgtttctcttagtgttttctaattctaacccactgtttttggaatttctattagatggttttgcaacttctgcatctatcctccatgcaccttcacatttccttcacagttttcgtgctgttttccttgtgtgctacattctgcacaggactcgag

SEQ ID NO: 624 - DNA (cDNA), 763 bp; double-stranded, linear
gaattcggccaaagaggcctacctcaaaggattggctaaaagcaagcaactggattgaacaccctaagaagaaagattcacactgcaccaggagacatcagaaagaatgaaaactctgccgctgtttgtgtgcatctgtgcactgagtgcttgcttctcgttcagtgaaggtcgagaaagggatcatgaactacgtcacagaaggcatcatcaccaatcacccaaatctcactttgaattaccacattatcctggactgctagctcaccagaagccgttcattagaaagtcctataaatgtctgcacaaacgctgtaggcctaagcttccaccttcacctaataacccccccaaattcccaaatcctcaccagccacctaaacatccagataaaaatagcagtgtggtcaaccctaccttagtggctacaacccaaattccatctgtgactttcccatcagcttccaccaaaattactaccttccaaatgtgacttttcttccccagaatgccaccaccatatcttcaagagaaaatgttaacacaagctcttctgtagctacattagcaccagtgaattccccagctccacaagacancacaggtgccccacccacaccttgtgacaactacacnagctccaccatcttcctcagctccaccagagaccacagtngccccacccacaccttttgcaactacacnagctccaccatcttcctcagctccaccagagaccacagctgccccacccatcttcgag

SEQ ID NO: 625 - DNA (cDNA), 476 bp; double-stranded, linear
gaattcggccaaagaggcctagtagtttctatgtgcggtctggggtgggggcaaggcccttgtgttccactggtttccaccacgttgacagcagtcgctggcagcagagagccatttcctgtcatgctggtctgttccaggactctgtggaagattctctatctccactggcacaggagcagaggaaatggaaggactcacaggcagagcagatctcatcccccaagcctgttgggagccattactttgggtcgaaacattattgtgaacactaagttcttcaggttttgtagcacatgctttcatttgtagagttcgtctagaatatcgtttgctgggccttctttcaaaggatgttgatcttcttgctttattggtttttgtggtctgatactctgttttcccactatatctaaatcgtgatcctagtcgaataaatcctgatcgatgagaactcttttggacggggcctcgag

SEQ ID NO: 626 - DNA (cDNA), 234 bp; double-stranded, linear
gcgattgaattctagacctgcctcaactgtctggtttcctgtaaaataaacacattgttttatatttttagggaacaaaaagtgctgctatagggttcaaagttttccttctgaacacttttccgaaacaaattaccccaaagacacattttgaatatcctggtcacatctttggatctgtaaaatataccttttagtatggcacctgttaaaatgcaaagcaaaaacctcgag

SEQ ID NO: 627 - DNA (cDNA), 583 bp; double-stranded, linear
gaattcggccttcatggcctaggccttgtgaatcattcagcataaggaactgtcaatatttttttgagctgtcagaaatccatttagtgattttcgacaattcaaaaaaatatttctgaccgcttgattcagttcctagtgaattagggaagaagaggaataaaagaaatatatcaatctaaattatgaacccagagtctagcttcctgaattcttctctgtgcttaaacgaacaacaggatgttgaggttcaaaaatactctcttctatttcccccccttccttcccttttctttccttctcttccattcctcgaaaagataataaaacagaatgtgcctagagcttctggaaagaatacagtcctgctgatactagaactcagtgaaatttgcaccagatttctgagctacagaactgaagataattcatttatttcaagccactgagtttgtggtaaatttgttacagtagcaataaaaatctaatacatgccttctataccagaagtacacatccacgtgaccattcctgtcctcaccccacacacacatacacacacacacacacacgcacactcgag

SEQ ID NO: 628 - DNA (cDNA), 295 bp; double-stranded, linear
gaattcggccttcatggcctacctgcctcgagttcctactgcccccgggcggcctgcacagagctgctgccctccagagactgtgaatcccaagcctgactcagtggactgcttcctgttcccctccctcctcttcctcaccttgttctgcaccctcaagcctttctccaatgcctcccaggaggatttggggactttctccctggggcgcccagatccagctcggaggcctcactgggacctggcaaggcctgacctcccgcccaaacttgcttctgtagcccccctactcgag

SEQ ID NO: 629 - DNA (cDNA), 344 bp; double-stranded, linear
gaattcggccttcatggcctaacctgttgcttcccctgggactgaaggcagaagtgactcccgaaattctctttctggactcagaaggaaaccaaagcaattgatgacaccgcatcccatactaaaagctatggaagagagagcaattcaacgagctgaatgtaggcggatcttggcagagaagnagaaaaaacaagaagaaganaaattggcccagttaaaggcccaagaggaggaacgtcagaaaagggaggcagaagaaaaggaggcacagcttgaaagaaaacgagaagagaagagactgaagaaaatgaaagaacttgagaagcagaagagaactcgag

SEQ ID NO: 630 - DNA (cDNA), 257 bp; double-stranded, linear
gaattcggccttcatggcctagttcttccttaggaacaagggcaggacctcaaacagtccagaggagaagcctggggtggtcagggaaggcttcctggctgagaggacaggcttaggggcaccttgaaagttcaggctgactggggctaggggcatgtgggtaacaggttaaaggggggggggctggaaaatgcagacaccaaagacccttcaatatgaggccaagaaaggaaggttcagaacagggatcactcgag

SEQ ID NO: 631 - DNA (cDNA), 326 bp; double-stranded, linear
gttccaaatccatgggaaccagcacaggagctacagcaaatcatggcacttctgcagtagcaattactagccatgattacctaggacaagaaactttgacagaaatccaaacctcaccagaaacatcaatgagagaggtgaaagcggacggagctagcacccccaggttaagagaacaggactgtggtgaacctgcctcgccagcagcatccatctccagactctctggggaacaggtcgacgggaagggccaggcaggcagtgtatctgaaagtgcgcggagtgaaggaaggattagtccaaagagtgatattactgagctcgag

SEQ ID NO: 632 - DNA (cDNA), 480 bp; double-stranded, linear
gaaaaaatggaagaatttgtttgtaaggtatgggaaggtcggtggcgagtgatccctcatgatgtactaccagactggctcaaggataatgacttcctcttgcatggacaccggcctcctatgccttctttccgggcctgttttaagagcattttcagaatacacacagaaacaggcaacatttggacacatctcttaggttgtgtattcttcctgtgcctggggatcttttatatgtttcgcccaaatatctcctttgtggcccctctgcaagagaaggtggtctttggattatttttcttaggagccattctctgcctttctttttcatggctcttccacacagtctactgccactcagagggggtctctcggctcttctctaaactggattactctggtattgctcttctgattatgggaagttttgttccttggctttattattctttctactgtaatccacaacctattctcgag

SEQ ID NO: 633 - DNA (cDNA), 307 bp; double-stranded, linear
gaattcggccttcatggcctagcgggatcgtatcactacgcacgtggcgtcaatgacaaagacgccttccccacgggacaggccctgggaactgcggggcaaggtgtgggcacggcgggtcgccttccaaccctccagggtctccggtcctgccccctctccaagacccagagattctctccatccggtgcctccgggagcccagggtctggggagtgtctggctatggcggggcggctgctttttaggggagggaatccagcatttgggaaaccagatctgttctccttctttcccttccctcgag

SEQ ID NO: 634 - DNA (cDNA), 458 bp; double-stranded, linear
cctctgcaagaaatgcctaagcgtattatcaggaagtggaattataaaatgtttccagatcaaattaagcatctacaggtgaattaatatagaattaagcttagaaagcttaagtagaagttgaatgaattgtgttcattctttgaaacccattgatttgcaaaaccaatattccactgtctataggaggcaattcagactgaaaataatttagaaaaaaaaatagtccagaaaaaaaaatagttctagagataaataggtcatttgaagactaacctctgccattaggggtttctaaagataggctgactctatctatttaataattattttgttcattaactccttgcatatagaattgtaactgataccagccaggtacggtggctcacgcctgtaatcccagcactttgggaggccaaggcgggcagatcacctaaggtcgggagtctctcgag

SEQ ID NO: 635 - DNA (cDNA), 343 bp; double-stranded, linear
gaattcggccttcatggcctacccactctcactttgtacctctgtcagttatctcctctttacccttctttcaacgagcataccaccggccctcccagcacctatggcccaagccagttgtttgcaaattttatactgtgacacaggacaatttacacacacatacacagtttcacttgtgacatactttttttttgagatggagtctcacttcattgcccaggctggagtgcagtggtgtgatcacaccttattgcagcctcaaactcctgggctcaagtggtcttcctgcctcagcccccctagtagccaggattacaggcgtgcaccaccatttctcgag

SEQ ID NO: 636 - DNA (cDNA), 402 bp; double-stranded, linear
gtggataacaaacaaacaaatctgatgctccctgagtcaactgtttatggtgatgtggaccttagtaacaaaatcaatgagatgaaaaccttcaatagcccaaatctgaaggatgggcgttttgtcaatccatcagggcagcctactccttacgccaccactcagctcatccagtcaaacctcagcaacaacatgaacaatggcagcggggactctggcgagaagcactggaaaccactgggacagcagaaacaagaagtggcaccagttcagtacaacatcgtggagcaaaacaagctgaacaaagattatcgagcaaatgacacagttcctccaactatcccatacaaccaatcatacgaccagaacacaggaggatcctacaacagcacagagctcgag

SEQ ID NO: 637 - DNA (cDNA), 290 bp; double-stranded, linear
gcttcctcgcagcaagcggctggagatagagaagagcttactggtgcgagcgtccgtcgaccccgtcgccgctgacctagagatggcagccggtctcaccgacatatttcagcatgatacatactgtggtgatgtctggaacaccaacaaacgccagaatggcagactcatgtggctctatctcaaatactgggaactcgttgtcgaactgaagaagtttaagagagtagaggaagccatactagaaaagtaagacaagagtgaaatcaaactgcttttagtgactcgag

SEQ ID NO: 638 - DNA (cDNA), 463 bp; double-stranded, linear
gtcgagaaaatggggataatggagaaattgtgggcaagctggcttcctgggaagggactaattgaacaagacaatgatttatcttttcggggttcagaggcagcttgttaattcgaattattttctttatttttgcccacaagtgtttggttgtccttttctctggctttttacctgatcaggctgcaagctgcaaaggtgtggcttgtgctgcagatttgtaataaaagatgacaggtgagagagacagtggtggaactggtagagcttgcacacccacacggtgtggctgctcgggaggctgtctagtgcacctgccaacagagcacagatatcctctcttcctcatttcagattcctccttccagctgtttactaaacagcaacaaaaacaccctcttggctgtaacttgtcaaataaagtccctgcaaagtgtataagattttcctccccaacctcgag

SEQ ID NO: 639 - DNA (cDNA), 513 bp; double-stranded, linear
gcgagggagatggcagcctgggctttagcagcagggaggaaggtgaanaaagaaccggggcttgcagcagaggtgggttctgccttaaaggcagagacccccaacaactggaatgccacggaagaccagcatgagcctaccaaacctttggttcgcagggctggagctaattctcgctccaggagaaagaagcagaagaagaactccaggcaggaagcagtgccctggaaaaaacccaaaggcatcaattccaacagcacagctaacttggaggatcctgaggtgggtgatgctgaaagcatggcgatctcagagccgatcaagggcagcagaaagccctgtgtgaataaggaggagttggctttgaagaagcccatggcgaaatgtgcctggaagggtcccagagagccacctcaggatgcccgggcagaagccgagagcccaggaggcgcctctgagtcagaccaagatggtggccatgaaagcccaccaaagaagaaggccgagctcgag

SEQ ID NO: 640 - DNA (cDNA), 510 bp; double-stranded, linear
gaattcggccttcatggcctacacctcagcctccagagcagctgggactacaaacgtgtgccaccatgccgggctaatttttgtattttcagcagaggtggggtttcaccatgctgctggccaggctggtctcgaactcctggcttcaagtaatctgcccaccacaacctcccaaagtgctgggattacaggtgtgagccactgcgcccaaccaagagctcctttttgtttttctttttttgtgaattcggattctttatattcaggagttttacttaaactttgaatctgaaagaaactttaggaggagctcatagatttgtgggaagaagcaaatctacattattttctctcttctaaaatcatattccatgtattttgatcttttactgaattttaacacattgtttcatcactaacataaagtgtttcaatagtttttgtaactcacacacaaatactggatttaaaagttatatacctgagtatatttttatggcaggtctcgag

SEQ ID NO: 641 - DNA (cDNA), 308 bp; double-stranded, linear
gaattcggccttcatggcctagtgttcccagccagtctctattctctcacctaacactctcaaggagatagaagcttcagctgaagtctcacccaccacgatgacctcccccatctcaccccacttcacagtgacagaacgccagaccttccagccctggcctgagaggctcagcaacaacgtggaagagctcctacaatcctccttgtccctgggaggccaggagcaagcgccagagcacaagcaggagcaaggagtggagcacaggcaggagccgacacaagaacacaagcaggaagaggctcgag

SEQ ID NO: 642 - DNA (cDNA), 305 bp; double-stranded, linear
gaattcggccttcatggcctagttagatgaaaatctaaaggatgaatactttgaggaaatcatggaagaatatgaagatattagacagggccattatgagtctctcaaggagaggagatacttacccttaagtcaagccagaaaaagtggtttccaaatggattggctgtctgaacctcacccagtgaagcccacgtttattgggacccaggtctttgaagactatgacctgcagaagctggtggactacattgactggaagcctttctttgatgtctggcagctccggggcaaccccactcgag

SEQ ID NO: 643 - DNA (cDNA), 301 bp; double-stranded, linear
gcgattgaattctagacctgcacccagccaacactgagagattttaatgagtacttttatccacctgaccaccatcattacctatcacctgtcattcttcatccaccctacatccatccttcatccccccatcatccacccatctatccttcatccatccattcatcatggaaccattatccatccaactatcatccagccagccagaaatgacccattcatcttcatctctcatttcctctctctaaaccagttcttaatctggggccaaagtcctacccacacatcccttagtctcgag

SEQ ID NO: 644 - DNA (cDNA), 408 bp; double-stranded, linear
gaattcggccttcatggcctagatcccccgtggagaaagcagtgacacattcacacagctgttccctcgcatgttatttcatgaacatgacctgttttcgtgcactagacacacagagtggaacagccgtatgcttaaagtacatgggccagtgggactggaagtgacctgtacaagtgatgcaaaggagggtttcaaagaaaaaggattttgtttaaaatactttaaaaatgttatttcctgcatcccttggctgtgatgcccctctcccgatttcccaggggctctgggagggacccttctaagaagattgggcagttgggtttctggcttgagatgaatccaagcagcagaatgagccaggagtagcaggagatgggcaaagaaaactggggtgcacgcctcgag

SEQ ID NO: 645 - DNA (cDNA), 364 bp; double-stranded, linear
gaattcggccttcatggcctagttatgtgattaggagtagggttaggatgantgggaagaagaaagagaggaagtaaagtttaattatgcctttttgggtttattatccctgatgcatgtggccccccactgctgtgtccttctcctgttggctagggttagaccacacaggctaaactaattccgattggctaatttaaagagaatgacgaggtaagtgttttggcgggaaaaatggttatgacagagcaggtaataggaatgagttagggtggagtaggtaatcggaatgagtcagggtggagcaggtaattggaatgagtcagggtagagcaggtaatcgaaaaaggttgctttgctcgag

SEQ ID NO: 646 - DNA (cDNA), 320 bp; double-stranded, linear
gaattcggccttcatggcctaggagtgcatttggatctagtgttttctatcaatctgtctgctgatgtggcactactgcaccatttaccacaacattagaatatgtctgagtaactggttggcttagattttttgcattgagtcccaccccattttccagaactttcatggctattcttatatgtttgttttccgtaagatctttaggatcaatttgtctagttctaaagaggaaattctgatattattgatttagtaactttccatgaaaaaaacctaccatcacaggaaagatgcacattaattacaggtagctcgag

SEQ ID NO: 647 - DNA (cDNA), 267 bp; double-stranded, linear
gaattcggccttcatggcctagtcagtggctagattgattgatcctccagaattagacactcacatgttaacaccagtctcagttggagggctgatagtaaaccttattggtatctgtgcctttagccatgcccatagccatgcccatggagcttctcaaggaagctgtcactcatctgatcacagccattcacaccatatgcatggacacagtgaccatgggcatggtcacagccacggatctgcgggtggaggcgaggtctcgag

SEQ ID NO: 648 - DNA (cDNA), 321 bp; double-stranded, linear
gaattcggcttcatggctacttttggtaaagcatacccaaccttcagttagaatatctcctgataataagaaagatctcattgaaatttattaattcttttgtgtctagtagataacttggatggcacacagtgctttgatttttacctgcccagaatttaactcctcatcctatcctacatgattttctttttcctctcccccttcctcttttattccatgtcactgggaatggcaggtcttgcaccaagtaatggcaggtcttgcaccaagcaagccagaaacctgagctttagtctttattcctccccacttctcgag

SEQ ID NO: 649 - DNA (cDNA), 559 bp; double-stranded, linear
gaattcggccttcatggcctagaggaagtgaacggatggggcctcatcctcctgcctccctaaagggtgagggtggaaggatggggctgtgccctcttagggcagggaaaaacagcttggaggggtttctgccatcagagatcccataggaggcaggtcagtcctgcagaatttctccccagtctggcctccagcctccctggcccctttctagaggcctccatcccactggcggcttgctcctgccaccgggcctctgcacagtcacctcctgcagcctggggtgtgtcgcctctccacgtcttgatatttttgctggaatgcagacgatactatatttaccgtataatatattatcagctctcctatatctcagtcaatttacatagtttaaaatagaacatcttattaaaaacatctagatatacacagattaggaaacgcttacaacatacaaatacacaaactagaaataaatctttagcatactggtatatacaacagtgtgatacaataaataatttcattcatgctctatctacacatcatattgctcgag

SEQ ID NO: 650 - DNA (cDNA), 477 bp; double-stranded, linear
gaattcggccttcatggcctagggagactgaggcaggcagatcacctggggtcgggagttcgagaccagcctgaccagcagggagaaaccccgtctctactaagaatagaaaattaggtgtggcggtgcatgcctgtggtcccagctactcgggaggctgaggtaggagaatcgcttgaacccgggaggcggaggtcatggtgggccgggattgcaccattgcactccagcctgggcaacaagagtgaaactccatctcaaaaaaataaaagcctagcctcccaaagtgccaggattacaggcatgagccaccgcgcctgtctgtccgcccgtcttcttttttaagagcaagaaaaggtttcccagaagtactctggtagattcttatcacacacacattcctaaaccagttactggcaaagaaaatagaattatcatgattaattagcatattctgaagnacatgcttccctcgag

SEQ ID NO: 651 - DNA (cDNA), 414 bp; double-stranded, linear
gtgtgaacctacgggaaggcggccgcctgcacctctgtgcggagaccaaggatgatgccctagcatggaagacagcactgctggaggcaaactccaccccggtgcgcgtctacagcccgtaccaagactactacgaggtggtgccccccaatgcacacgaggccacgtatgtccgcagctactacggaccgccctacgcaggccctggcgtgacgcacgtgatagtgcgggaggatccctgctacagcgccggcgcccctctggccatgggcatgcttgcgggagccgccactggggcggcgctgggctcgctcatgtggtcgccctgctggttctgagccctgggactcggagcactgacccctgcgcttggattgctagactcctcttcctcctggaccccatcctctcgag

SEQ ID NO: 652 - DNA (cDNA), 325 bp; double-stranded, linear
gaaggaaaacatgggcacaggggattttatctgcatttccatgactggaggggcgccctgggggttcagattgcaaggtggcaaggagcagaagcagcccttacaagttgcaaagattcgaaatcagagcaaagcctctgggtctgggctctgtgagggagatgaagtggtttccatcaatggcaacccttgtgcagatctcacctaccctgaagtcatcaagctcatggaaagcataacagactctctccaaatgctcatcaaaagaccatccagtggaataagtgaggctttgatatctgaaaatgaaaactctaacctcgag

SEQ ID NO: 653 - DNA (cDNA), 443 bp; double-stranded, linear
gaattcggccttcatggcctaggtatttaggcttttgtcttaacagcaaatcctggctgtctggggcctgatgactgtgttccatgggtatccactccctgtccacagtgtgggagcccctcagctgcttattgcagggacacagagcccggcatggtccagaaggcgggcttatggggcctgcagcacacagggaaagtgagcccacactgtgataggagggcagacacacaggatgtgttctgtgttacagggttgccgtgaagaatttcattcttttgcaaggactggagagaaaattttatgtggaaggtagcccttggaaatgacctcaaagaataggtaggatcttagcctgcgtttgaaagcctggaaaaaaacaggatgacaggatgaagaggccacagcacagctgcagacaatgggagtgcggagatctcgag

SEQ ID NO: 654 - DNA (cDNA), 311 bp; double-stranded, linear
gggagcgccggtggttcatcctgaccgataactgcctctattactttgaatacacaacagataaggagcccaggggaatcatcccgttggaaaacctcagcatcagggaggtggaggacccccggaaacccaactgttttgagctctacaatcccagccacaaagggcaggtcatcaaggcctgtaagacggaggccgacggcngcgtggtagaggggaaccatgtggtgtaccggatctcagccccgagcccggaggagaaggaggagtggatgaaatccatcaaagccagtatcagcagatccctcgag

SEQ ID NO: 655 - DNA (cDNA), 346 bp; double-stranded, linear
gggggatacggatacccaaacttcaatgttccttgatagtaggaaggaggacagttatatagaccataaggtgccttgcacagattcacaagtgcaggtcaagttggaggaccacaaaatagtaactgcctgcttgcctgtggaacatgttaatcagctgactactgagccagctacagggcccttttctgaaactcagtcatctttaagggattctgaggaggaagtagatgtggtgggagatagcagtgcctcaaaagagcagtgtaaagaaaacaccaataacgaactggacacaagtcttgagagtatgccagcctccggagaacctgaaccatctctcgag

SEQ ID NO: 656 - DNA (cDNA), 116 bp; double-stranded, linear
gaattcggccaaagaggcctactaaaccgtcgattgaattctcgaggcaggtctagaattcaatcgacggtttaggctccctatagtgagtcgtattaatttcagaggtgtattta

SEQ ID NO: 657 - DNA (cDNA), 482 bp; double-stranded, linear
gaattcggccaaagaggcctagggatgagggtgaagaaggggagagggttggttagagatacagtgtgggtggtgggggtggtaggaaatgcaggttgaagggaattctctggggctttggggaatttagtgcgtgggtgagccaagaaaatactaattaataatagtaagttgttagtgttggttaagttgttgctnggaagtgagaagttgcttagaaactttccaaagtgcttagaactttaagtgcaaacagacaaactaacaaacaaaaattgttttgctttgctacaaggtggggaagactgaagaagtgttaactgaaaacaggtgacacagagtcaccagttttccgagaaccaaagggaggggtgtgtgatgccatctcacaggcaggggaaatgtctttaccagcttcggtggctggcacgtgttaccaggccgagtgggatgactatgtgcccaaactgtacgagctcgag

SEQ ID NO: 658 - DNA (cDNA), 430 bp; double-stranded, linear
gaattcggccaaagaggcctagtcgagtcccttctgtcccagtcgttcgtgcctcttgtcccacgcaactccagcttgtaccatgccggtcaaaggaggtagcaagtgcatcaaatacctgctcttcggatttaacttcatcttctggctcgctggcattgcagtgcttgctattggactatggctccgattcgactctcagaccaagagcatcttcgagcaagagaataaccattccagtttctacacaggagtgtacattctgattggagccggggccctcatgatgctggttggtttcctgggctgctgtggagctgtacaagagtcccagtgcatgctgggattgttcttcgggttcctcttggtgatattcgccattgagatagccgccgccgtctggggctatacccacaagagtcgagtcgag

SEQ ID NO: 659 - DNA (cDNA), 290 bp; double-stranded, linear
gaattcggccttcatggcctaagagtacagagatttcacttcatcttgtgctaatgtttaattnaaagtatattgacactagtaaagacactttattttaatttgaggtataaatgtctacctaaaatagactatttccattgagtcatacattttaaatgtggtatatattcttatatttcagaaaatgataactatcatagaaatctaatactcattaatttgattaataattatttttttcctcaaatttggaaatatcttttcctatgtaatggtcatgtctcgag

SEQ ID NO: 660 - DNA (cDNA), 406 bp; double-stranded, linear
gaattcggccttcatggcctagtcagaagtctttgtgtccctgtttttgtgtccatttcatgtaccttggcactttaaggcttgtcctgcaaaataaaacattgcatcatcacttgtgaaggcagagcttgggagtttgcactgctaagatgaggataggaaagaaatttatgccgcagggcctttgatgctgcccactcacctgtctgcacagccagggcacggccagcgggagtggagaagacgagcgagaccaaaaccttgccgtggggaggagggtggcatagccattgataaatcgggacttgaactatcccatcactctaaaaatattttttatctgattacaaaagtaatagatggccaggcatgatggctcatgcctgtaatcccaacactcctcgag

SEQ ID NO: 661 - DNA (cDNA), 461 bp; double-stranded, linear
gaattcggccttcatggcctagtggaactgaaaactcagaggaggcatcaaacccaggcttgggggacaaaactaagtcttgccagagtcctgaaggatgaacaacagttaaccaagcaagggatactggagggcatggaggctctctggcctggagtgcagagcatggagtgctcaaagagctagttagctctgcaaagctgagtgtcaggaatgtaaagggagagaataggagtgagagaagagtctggcaaggcagacagggaaggcctatatgccttgatggagaaccactgaaggatttaaagaaggagagggttaattttgtccaatagaaagatcacattgtgtgtagtgtggaggatgggttgcagagagagaagctagagaccaaaagatgagacgggaacagctgcaaatttcgagagctcgtaagattatgtatggctggaccactcgag

SEQ ID NO: 662 - DNA (cDNA), 502 bp; double-stranded, linear
gaattcggccttcatggcctagcctgagctcaggagttcaagaccagcctgggcaacacagtgaaactccatctctactaaaatacataaaaattagctgggcctggaggcatgcacctgtggtcccagtgctactggggaggctgaggcaggagaattgcttgggcccgggaggcagaggttgcagtgagccaagatcgcgccactgcactccagcctgggcaacagagcgagactccatctcaaacaaacaaacaaacaaacaaacaaacaaaacaacagttatttttttctcaccattctaaagaatgttacatttgattctttttcaaaatttggtcagttttgatagtcttatttctccatactttcattccccctttttatttctgtaaataattgaactttatattccttatatgataattttaatatccaaagtcattggtcatattctccagttcatgatttctgctgagtttgtggtgctgattttctcgag

SEQ ID NO: 663 - DNA (cDNA), 485 bp; double-stranded, linear
gaattcggccttcatggcctacaaccaccaacatttgtgtttttgcagatgaacaggttgacagaagtcccactggctcaggagtgacagcccgaattgccttacagtatcacaaagggcttctggaactgaaccagatgagagccttcaaaagcagtgcaactggctcagtattcacagggaaagctgtgagggtaagtggcacccttagcttcttatttataaatgtgtcactcatgagactggagaggcctgagttgggtgtttgataaatttcttcactcagctctcagaagagaattttaaagcaggcctgtaaaaacttcttttcaactaggacattggttatccagtgtggtcttggggccccagcgggcccctaaggtcctttccatgggttcagagggtcaaaactgtgttcataataatgacattatttgcttttcactctcattctctcaagagtgtacagtgggttactcgag

SEQ ID NO: 664 - DNA (cDNA), 348 bp; double-stranded, linear
gaattcggccttcatggcctaaaaattataaagtgtaaaatatctttgtatctctagtttttctcctttccccagataagaataaaagcaggctgcaggctcctggggtgataacccacttgggtcgagttccatcgctgttggcgataaatcttgttggtgttcactttttgggttctcactacctttatgagctataacactcaccctgaaggtctgcagcttcactcctgaagccagcgagagtacgaacccacaggcaggaagaaactctgaacacatccgaacattggaaagaacaaactccaaacaagccgcttttaagaactgtaacactcacaactcgag

SEQ ID NO: 665 - DNA (cDNA), 571 bp; double-stranded, linear
gaattcggccttcatggcctagtcgttatcagaggtggagacatttagaagttgttcttaatcagagtgaagcttgtgcttcggaaagtcaacctcactcctcagcactcacagcacctagctctccaggttcctcatggatgaagaaggaccagcccacatttaccctccgacaagttggcataatatgtgagcgcctcttaaaagactatgaagataaaattcgggaggagtatgagcaaatcctcaataccaaactagcagaacaatatgaatcttttgtgaaattcacacatgatcagattatgcgacggtatgggacaaggccaacaagctatgtgtcatgaagctttgtcacatatctgggtaccaggtttgacctcaagagatggctgctgtacactttttgcaactggtttgatgtcacatttcagctccaactttgcatcctgagaacacttaaacgtttctgcaggtccattttatacaacttgaaagaccgtaaaactttctggttgccacaagcatatctttcttttctgctcatccaataaacagctgagccctcgag

SEQ ID NO: 666 - DNA (cDNA), 444 bp; double-stranded, linear
gggatcattattattcagctactgagaactagaatattaagagactgctggcaaggcaagcagttaattttcagttgaaattgcattaaataaaaagtattttcttgctttgtggaagcacgtgaatttttgtaaaaagctgcttgttttccccatttacaggttctgtacagagtaatgagatgtgtgacggctgcaaaccaggtgtttttttctgaggctgtgttgacagctgctaatgagtgtgttggtgttttgctcggcagcttgaatcctagcatgactatacattgtgacatggtcattacatatggattagaccaactggagaattgccagacttgtggtaccaattatatcatctcagtcttgaatttactcacgctggtatgtgaattattcttttcctttttaatgtgttggtttattcaggcccatctcgag

SEQ ID NO: 667 - DNA (cDNA), 524 bp; double-stranded, linear
gggaactgacaagcaattaactggagaataagtgaggggaatggagcagtagtattctttaacttaatttgccatttaagagagcacttggaatctgaagaaagtctatccctaccaaggaaacggagtcaaattgcaattaagattaactttggttatatggaagcaagaatcatgcttctcatcatcaattgcgtctctttggtagccaataattccatctgtaatcatggcagcaacttaagtattgccaatgttttcaaatgtgttacagcattaaggcatccacatctaaagaggcagttttaaacaagaggaaaacggaactgaaatgtgccaagaagtgaacacggacatggcctctcctggaatactgcccaccatgccagcaagctcttcctccagtcaagaaggcctgtgccacgctgcttggttccctgctgcctgaagatgcatttgagccctatgagattagtatggctatttctgtctgctgaccaggagagaaatgagtagttctcgag

SEQ ID NO: 668 - DNA (cDNA), 554 bp; double-stranded, linear
gaattcggccaaagaggcctacacagagggataattggcattggtatcaactgacatattcacaactttgaataaaactttccacatttggaaaatcaccatgcctggcccctaggctatactttgaaaaccactgctttagtgttttagaaattgttaccctcatactaatatttactacaccccccaccttgacaatacatacaaaagaggagtaacagtttcccataacctttctaaatttgagtcttattaaaccagactcatagcccttgttgacttttcttcctgatctgtgccttatccctagggcggtgatcatgcgggtatctgctaattggcagatgtgagtggttatacctatttacaagcaactcattgcaaaaataattttagctaaagaaaacatccatggccagagaataagttttggaatttgatatgttaaatgagctttatgtttacctttaaaaggttaaaatatttaccattcatggattaccttttttcagaaagtaagaatatataaattacatttaatcttgaagctcgag

SEQ ID NO: 669 - DNA (cDNA), 329 bp; double-stranded, linear
gaattcggccttcatggcctaatcgtattccatctactgcatacttttcatagatgtcctccatcagaagcacctatggttgtttgttaaacgtgttatttcctgatcccaccccaggatttctgagtattctaagaatttctaagtgtaaggcctggaaatatgcattttacaaccccctagaacattcttatgtgcactaaaatttgagaaccactaatctggtgtatatactgttgttacttaatattttcttaatgatagatacttggatgatttttgactttattattattataagcaatgttgtaaacatcacacaggccaag

SEQ ID NO: 670 - DNA (cDNA), 267 bp; double-stranded, linear
ggcgtatgatacctaaagtggagtggtcggcgttcctggaggcggccgataacttgcgtctgatccaggtgccgaaagggccggttgagggatatgaggagaatgaggagtttctgaggaccatgcaccacctgctgctggaggtggaagtgatagagggcaccctgcagtgcccggaatctggacgtatgttccccatcagccgcgggatccccaacatgctgctgagtgaagaggaaactgagagttgattgcaccagactcgag

SEQ ID NO: 671 - DNA (cDNA), 429 bp; double-stranded, linear
gaattcggccttcatggcctattatctctcaaaaacaaagcaataagtaccaagaaatagcaacaaaaattagcttgtaaggttggtttctgagggtagaaatggctcttgatgccatgtggagcaatgggaaggaggctttctagttacacagactcttggtcctgccacttattcattttattttattttatattttactttaaattttttgagatagggtttcaccctgtcgcccaggctggtgggcagtggctcactgcagcctcgaactaccaggctgaagtgatgctcttacctcagcctttcgagtagttgggacaacaggtgcacaccaccattcctggctaattaaaaaaatttttttgtgggaacatggcaagaccttgtctctattaacaacaacagcaacagcaacaacaactcgag

SEQ ID NO: 672 - DNA (cDNA), 357 bp; double-stranded, linear
gtaaaatcgttcttgagaggaacgtctctgtgcgaagagataatgagtttagctctgagaagtgagcttgtagtggacaaaacaaagaggaaaaaaagaagagaactgtctgaggaacagaaacaagaaattaaagatgcttttgaactatttgatacagacaaagatgaagcaatagattatcatgaattaaaggtggcaatgagagccttggggtttgatgtaaaaaaagctgatgtactgaagattcttaaagattatgacagagaagccacagggaaaatcacctttgaagattttaatgaagttgtgacagactggatattggaaagagatccccatgaagaaatactcgag

SEQ ID NO: 673 - DNA (cDNA), 292 bp; double-stranded, linear
ggtagatactggtttttcgtatcctgcttctcttaagggcagctctttttagcatactcccatgcagcaacagaaatttgtatcttttttttcttttttgagatggagtctcgctctatcactaggctggagtgcagtggcacaatctcggctcactgcaacctctgcctcctggttcaagcgattctcctgccctagcctcctgagtacctgggactacaggtgcgcgccaccacacccagctaatttttatatttttagtagagacggggttttaccatgtggcctcgag

SEQ ID NO: 674 - DNA (cDNA), 470 bp; double-stranded, linear
ggatggacatcagcactttacggcgccagctgagacccacaggccagctccgtggagggctcaagggctccaagagtgaggattcggagctgcccccgcagacggcctccgaggctcccagtgaggggtctaggagaagctcatccgacctcatcaccctcccagccaccactcccccatgtcccaccaagaaggaatgggaagggccagccacctcgtacatgacatgcagcgcctaccagaaggtccaggactcggagatcagcttccccgcgggcgtggaggtgcaggtgctggagaagcaggagagcgggtggtggtatgtgaggtttggggagctggagggctgggccccttcccactatttggtgctggatgagaacgagcaacctgacccctctggcaaagagctggacacagtgcccgccaagggcaggcagaacgaaggcaagtcagacatccaactcgag

SEQ ID NO: 675 - DNA (cDNA), 637 bp; double-stranded, linear
gaattcggccaaagaggcctagtcgctcttgctgaaaccttcaatgcagtgagcgcccatctcattgggacctacaggctgaagttcttcctctgatggacatgacccccgtgttgtctctaataacctcactttcactctgttccagccacacggggtttctgtctttctcgggtcatgtcgggcttatgtgcctcgggccctttgctcatgctgttctctgcctgggatgcgctttactgggtgccaggatggtcagtgattccatttctctcagagtctattcacaggtccccttctcggtcacgccttctctggctccactgtctaaaatttcaacagctgcctctgccccccgaacttcatatcccccttatctgccttttttccttcagctcttacttccatcaaatacagtatgtatttttaaaagtcttatcttgttcacggtcattttcttccacaggtaattttggtaaactttgtaagattgatgatgtttaatactgttttgtttaatacagtacccccagtttagcacacagcttttgaatgaatgaccagtttttattcccctctgaagcgctaagagctgccgctgaggtggcatctgtagcngctcccgctccaactcgag

SEQ ID NO: 676 - DNA (cDNA), 513 bp; double-stranded, linear
gaacacgtcatgaggaaggagcagcgcaaggaggagaaggagaagcggcgcctcgaccagctggaacgtaagaaggagacgcagcgcctactggaggaggaggactccaagctcaagggcggcaaggcgccgcgggtggccacgtccagcaaggtcacccgggcccagatcgaggacacgctgcgccgagaccatcagctcagggaggccccggacacagccgagaaagccaagagccatctggaggtgccgctggaggagaacgtgaaccgccgcgtgctggaggagggcagcgtggaggcgcgcaccatcgaggacgccattgcagtgctcagcgtggcggaggaggcggccgaccggcacccagaaagacgcatgcgggcagccttcacagcctttgaggaagcccagctgccgcggctcaaacaagagaaccccaacatgcggctgtcgcagctgaaacagctgctcaagaaggagtggctccgctctcctgacaaccccaaactcgag

SEQ ID NO: 677 - DNA (cDNA), 376 bp; double-stranded, linear
gtccatcctgagctccatggagaagccacccagcctcggtgaccaggagactcggcgcaaggcccgagaacaggccgcccgcctgaagaaactacaagagcaagagaaacaacagaaagtggagtttcgtaaaaggatggagaaggaggtgtcagatttcattcaagacagtgggcagatcaagaaaaagtttcagccaatgaacaagatcgagaggagcatactacatgatgtggtggaagtggctggcctgacatccttctcctttggggaagatgatgactgtcgctatgtcatgatcttcaaaaaggagtttgcaccctcagatgaagagctagactcttaccgtcgtggagaggaatgggcccccctcgag

SEQ ID NO: 678 - DNA (cDNA), 350 bp; double-stranded, linear
gaattcggccttcatgcctagcaggaggttttattgtaaagaggccgattgtacagagcaaagattgttctgacacggggggctgggtggtgggacccagaggccagagctgggtgaaggatgaggggtggcatcgccccatccaggcagtgggcagggcagggaggactaaacggctgcctcccagttcccttccctgcccctcattactgggtaagagggagccaggctatttccacggatccaggagaatatagcaggagaccctcaccaccccacaccatgccccaaggatacgggaggtgccccagtctggcttttgcagtcggccagctcccagcctcctcgag

SEQ ID NO: 679 - DNA (cDNA), 357 bp; double-stranded, linear
gaattcggccttcatggcctagttctcaccggggaaaaacccactgttaggatggcatgaacatttccttagatcgtggtcagctccgaggaatgtggcgtccaggctctttgagagccatgggctgcacccggccgtaggctagtgtaactcgcatcccattgcagtgccgtttcttgactgtgttgctgtctcttagattaaccgtgctgaggctccacatagctcctggacctgtgtctagtacatactgaagcgatggtcagagtgtgtagagtgaagttgctgtgcccacattgtttgaactcgcgtaccccgtagatacattgtgcaacgttcttctgttattccctcgag

SEQ ID NO: 680 - DNA (cDNA), 250 bp; double-stranded, linear
gggggtggaaggcgtagtgcttgaaatgcagggatctggcagtcagcagaaggatctgagacccagtgtcgaggttaaaaaaaaaacaaaaaaccaaaaaccaatgcaggaatccagtgggtggagtgaggggatctgggatccagtgatgggggccccaggatccaggcattgtggttgtcaggatccagtggtgaggtttgttgacatccagaatccagcagctgagcttggagatccagggctcgag

SEQ ID NO: 681 - DNA (cDNA), 406 bp; double-stranded, linear
ggattcctacaaaaattgaggcagaagatcaaaatcggagtggtaggcggatcggactttgagaaagtgcaggagcaactgggaaatgatgaatattcaaagtcatctgggtgaggccctaatccaagatttaatcaactactgtctgagctacattgcgaaaattaaactcccgaagaagaggggtactttcattgaattccgaaatgggatgttaaacgtgtcccctattggaagaagctgcagccaagaagaacgcattgagttctacgaactcgataaaaaagaaaatataagacaaaagtttgtagcagatctacggaaagagtttgctggaaaaggcctcacgttttccataggaggccagatcagctttgatgtctttcctgatggatggaaactcgag

SEQ ID NO: 682 - DNA (cDNA), 316 bp; double-stranded, linear
gaattcggccttcatggcctacccttctaggtgtcatctccttccctccctttcccccaagactccctctgggcccagccagcaggtgaagcctgacttagggaaggggggatttccaggggaggggccctggcccccactgacccagcattgctatccacaggaggagcagcccccacaacatcgatccaagagggggggctcagtgggcggcgtgtgctacctgtcgatgggcatggtcgtgctgctcatgggcctcgtgttcgcctctgtctacatctacagatacttcttccttgcgcagctgtccctcgag

SEQ ID NO: 683 - DNA (cDNA), 394 bp; double-stranded, linear
gaattcggccttcatggcctaattgaattctagacctgcctcggcctcccaaagtgctgggattacaggtgtgagctagcactcccagccgacaggtgcttcttaaatgttttctttgagcaggaattggtccaggaattggttctcaagttagaaggaaaatttgaggggaagaacttgttttttctccaatcagtctctgattaaatagttattaggaaaaactccttgcttatgtctttgtattgcacatttttatatatgtatatatgtgtaaatagagatatttatatattcacagacaaacacgtgtatgcacatttcacaatggaggaagaagggatatggtgtgcactgaggtaaagtgagcagggatacagaagagaaactcgag

SEQ ID NO: 684 - DNA (cDNA), 509 bp; double-stranded, linear
gtcctaaccttgggtccaagtttcgttatagtggcaggacacaagcgcaaacgagaagagccagtgcgttgatagatcgcccagcaccttactttgaacgctcatccagcaaacgttataccatgtctcgcagcttggatggagcatcagtgaatgaaaaccatgaaatatacatgaaggattctatgtctgctgcagaggttggtactggccagtacgccacaacaaaaggcatctctcagaccaacttgatcaccactgtgactccggagaagaaggctgaggaggagcgggacgaggaagaggacaaacggaggaagggggaagaagtcacgcccatctcggccatccggcacgagggaaagactgacagtgagcgcacggacaccgcagccgacggggagaccaccgccactgagtcggaccaggaggaagatgcagagctcaaggcacaggagctagaaaaaactcaagatgacctgatgaaacatcaaaccaacattctcgag

SEQ ID NO: 685 - DNA (cDNA), 441 bp; double-stranded, linear
gaattcggccttcatggcctaccaaagtgctaggattacaggcgtgagccactgcgcctggcctctttcttctttcttgaattctcttctttttatgttcctgggaaaatcctactcattttatatgatttggctgatgtaaagccaccattgtcttcctaagcagagagggtcttgcttttgggtgctgcacaactttgtgcaatttttctgttacatcatttatcttttggggattgtttattttcatacttatctctcttccaggaccatgttagggagaggtgtttttaatttttaccttttctgcagcacttagcacagtgcctaatcatagtaaatatcacgtaaaagttgaatgaaggaatggatgtttgatatagagttaggacacctgtgtccaggtctggctttgcttttcctttnaccccccacctcgag

SEQ ID NO: 686 - DNA (cDNA), 273 bp; double-stranded, linear
gaattcggccttcatggcctagttggtttatgttatgtaaagttatgtagttatgtaaaggtgctgaaatgtcactcttgtgattatgttttattatataaggctctatcttagcaaaccaggagagaaattctcctgatggccttgaagaagcaaacagccacctggttaagcccctgtggatagtgccaagtggcaggaaagtgggagccacctctaggacctgaggattaaagtcagtaagagctgggacctcactcatgcagactcgag

SEQ ID NO: 687 - DNA (cDNA), 124 bp; double-stranded, linear
gaattcggccaaagaggcctagggctctggattttgagtttcgggctctagatggaattgagaaggtccaacttgctcagagggccctggaggctcatctgacttcacccggattttcctcgag

SEQ ID NO: 688 - DNA (cDNA), 426 bp; double-stranded, linear
gaattcggccaaagaggcctatgccatcttagtccctcttcccaaccccattttttagttactttcctttcattaaaatatccttatgcacttacaaataaaactaagtcccaagagggcaacaaaatataagattcttaatgatacaaaaacaaatctttctgatactagatcttttatactagaaaaataaattcttgtgcttgaacatcatttttaagcacttagtgaattgagaatctgaactgccacttgaaatattcccgggaaagaaacattatgaaccaaatgaaggaacatagctattcaaagggacatatttttgtacttgttttgctccaatttctgctacatagactgctccagtctttctgtcgactctaggagatgcctaaaccgtcgattgaattctagacctgcctcgag

SEQ ID NO: 689 - DNA (cDNA), 205 bp; double-stranded, linear
gaattcggccaaagaggcctatagttttttcatgttacatcttttagattattttctttttaatctatctgtgactatatttaaagtcaattcttgttttttccttttcctttttgtgggtaacggggtctcgctgtgttgcccaggcagatctcaaactcctgggctcaagctgtcctcccacctctgccaccctaggctcgag

SEQ ID NO: 690 - DNA (cDNA), 100 bp; double-stranded, linear
gaattcggccaaagaggcctacgttgattgagcactgagcccttactacgtgctaggcatggtacatgcatggccttatttaatcctatcaaccctcgag

SEQ ID NO: 691 - DNA (cDNA), 302 bp; double-stranded, linear
gaattcggccaaagaggcctacatcatacaagtcgtcgtaaagcaaatctgagctgttgtcattggaaggcactttagttttgatgcagtattccgccagggttgtggggaccttcactccatccttttctgcttcggccttagtggctgaaacttgtttcctaataatttcagcatattctttgtcttttcctttactgtctctccatttcctgaacataactgaagcatcgacattggctggggagaaggtgttgggctcattaagcagtgagattacacttaataggatagtcctcgag

SEQ ID NO: 692 - DNA (cDNA), 662 bp; double-stranded, linear
gaattcggccaaagaggcctaccaaataccaggctaccatggtctacaagactctcttcgctctttgcatcttaactgcaggatggagggtacagagtctgcctacatcagctcctttgtctgtttctcttccgacaaacattgtaccaccgaccaccatctggactagctctccacaaaacactgatgcagacactgcctccccatccaacggcactcacaacaactcggtgctcccagttacagcatcagccccaacatctctgcttcctaagaacatttccatagagtccagagaagaggagatcaccagcccaggttcgaattgggaaggcacaaacacagacccctcaccttctgggttctcgtcaacaagcggtggagtccacttaacaaccacgttggaggaacacagctcgggcactcctgaagcaggcgtggcagctacactgtcgcagtccgctgctgagcctcccacactcatctcccctcaagctccagcctcatcaccctcatccctatcaacctcaccacctgaggtcttttctgcctccgttactaccaaccatagctccactgtgaccagcacccaacccactggagctccaactgcaccagagtccccgacagaggagtccagctctgaccacacgaccctcgag

SEQ ID NO: 693 - DNA (cDNA), 321 bp; double-stranded, linear
gaattcggccaaagaggcctaagcccccaaaacacgctcttttgtgcctcccctcaaatccttcacagtgttcttccatatccactccttccaggaagcatgttctcactaccccagttcatgtgggtttcttccctctcagaatttctatcatgcccctataagtttagcaaattgtccttctctaattgtttcacatctgtccatccgatatcccaggaggactgtcagctctatgaaggcaggggttgtctttcctttaccatgcctaccatgccttatagtgttaataaattaacctacccagaaatgtttctcgag

SEQ ID NO: 694 - DNA (cDNA), 357 bp; double-stranded, linear
gcgattgaattctagacctgcctcaatcccctccctacttgctttttcttagcatataaaagtccacaagttttactcatctttttaaaaaacgaaaacatccttagaccgtgtcctccattagttgctatcctgccttcttctctcagctgagctgtctgaaacatgctaacatgcttatacaatacttgctgtcctgccttctgctctcagctgagctctctgaaacatgctaacatgcttatacaatacttgctgtcctgccttctcctctcagctgagctctctggaacatgctttttatacaatacttgctgtcctgccttcttctctcagctgagctctctggaactcgag

SEQ ID NO: 695 - DNA (cDNA), 225 bp; double-stranded, linear
gaattcggccaaagaggcctatgggtttttaaaaattttgtttttattttttcctttgatgtgcagaggctgtttactttgatgcagtctcacttgtttatattttattttgttgctggcctaggcctctttggccgaattcggccaaagaggcctagtcgggtgtggcagtgccattctgcagtcccagccaccgggaagaccgaagcgggaggatcactcgag

SEQ ID NO: 696 - DNA (cDNA), 314 bp; double-stranded, linear
gaattcggccaaagaggcctatccgcttctgttgcagctggcggtgctcggcgcggcgctggcggccgcagccctcgtactgatttccatcgttgcatttacaactgctacaaaaatgccagcactccatcgacatgaagaagagaaattcttcttaaatgccaaaggccagaaagaaactttacccagcatgggactcacctaccaaacaactttctgtcgttgtgccttcaaacaatgaagaaaaacggttgcctgtgatgatggatgaagctctgagctatgtagagaagagacagaaacgagacctcgag

SEQ ID NO: 697 - DNA (cDNA), 353 bp; double-stranded, linear
gaattcggccttcatggcctacagagtgtggacggcccactgggttggtggtggtgggtgcccgtcacagggctggaggtgtggccggcccactgggttgtgctttctgccgtacgtcccttcccatgaggatgagatgacccatctgttgcatcccggctgctgataaaacaagaccctcggagccaagaaacaacactgagttccagatttcggaaggttcacgagtgttgccgacacgccctcccaactgcagacatcctccctggaggacctgctgtgctcacatgcccccctgtccagcgaggacgacacctccccgggctgtgcagccccctcccaggcccctcgag

SEQ ID NO: 698 - DNA (cDNA), 449 bp; double-stranded, linear
gaattcggccttcatggcctagattgacagaggtcagttgtcacttcttgcctctctccccttccagcaacatgtataatcctgtgagtgtttcttcagcacccttctctgttgtttacactactgcaagagcctccctaagtggtctgcctgtttccaccctgttgtcttggaatttagttttctcgcaaaagccagagaatgttttcagaaggtagctcttgagcaacttcccactttcttggaggggagatccagcttccccaacaagaccagcaggcccctgtgcggcctggctcctgttcaccctaccagtcttggctcaggctcacggctggaatatgccgagctctttcttgtcctggggcctttgcacttggcttccctctgtccaaaatcatcttcctgtagctttgtgcttgcctagctcatcatcatagcagctcgag

SEQ ID NO: 699 - DNA (cDNA), 340 bp; double-stranded, linear
gaattcggccttcatggcctacagagaactgaggaaaaccaactacgtggagaatctcaaagaaaaaagcgagggagaagcttcactgtatgaagatagaataataacaagagagaaggacatgaggagagtgagagatgagcccgagaaggtggtgaagcagtgggaccatagtgaggatgagaaagagacagatgaggacgatgaggcttttggggaagctctgcagagcccagcaagcggaaagcagagtgtggaagcaggaaaagccagaagcgatttgggagcagttgccaagggcctgtcaggagaattaggcacaagatcaagagggctcgag

SEQ ID NO: 700 - DNA (cDNA), 380 bp; double-stranded, linear
gaattcggccttcatggcctaagccaagcaaggctgtacctttaattactgctgccctcatttgcatctggctgccctcattatagtgctattagcagagtgcaggggtcctcctgctggcccatcgggagtggtgcgtgcacagttgtggggccttgctttggtggtctttgctgccttctgggcaaaatgaaggatttggagtagacagcaagcaggcatacatcctgggccagaagcagcctgcggagctcatcgtggcttgccttaaattgtttctcaacaataaagttgttgaaaaacaatttgtgttttctttctccttattaaaaacccaaaattatattcattatagaaaattaaagaagatagctctcgag

SEQ ID NO: 701 - DNA (cDNA), 319 bp; double-stranded, linear
gaattcggccttcatggcctaattgaattctagacctgcctcagcctcccaaagtgctgggattataggcgtgagccaccgcgcccagccgaaaatctaaagatattgaaaagatacaaaggagcacattatgaacatttttttcgtatcactgagtattttataactgcatcattgattttaaaagaattcatgactttgaaaactaatattctacaaagtagcttttgatttaacatgagattttatatatgtgcttatcttggttctctatgaaaccccattgaaataagaaaatgtaaacaccagccaactcgag

SEQ ID NO: 702 - DNA (cDNA), 549 bp; double-stranded, linear
gaattcggccaaagaggcctaatagtcaagacctttgcagttttgatcacagaaatatgaaagattacacagctacagctatatgaatgataaaagtgacagctatggatttttaaagttataagttgctatactacatatatgtaatgtgtgtgtgtatagtgtgtaggtatatatatttatatttatacacacactatacatgtattttaaaatattgaaaatccagaattattttatggtaaaaattactaaaattgacttcacatgctgaatgaagagagcctgagtagaccaacaaacaaatgaaaaattaagacggttagaagatacgctttctaaaagaatacatttagaatctaactttaaaaaaaaaaaatcctactctcctgagccagagtggtctcagagagactccgagaacctaattttttacaagtaaaatctttgaagaattggtaattgctaaatttttccaacatactattctacaagactaacctaaaactgattataagaactaggtgaggagggccggcaaaactcgag

SEQ ID NO: 703 - DNA (cDNA), 758 bp; double-stranded, linear
gaattcggccaaagaggcctatcgagccactgcacctggccgatgtgttctgtttgaaatcttactcaaaagtatttgaagagttgtgtatagttgtatggatatgtctgtagtaaacagaaacaaattgcttcagtttctctttacttattttctaggttacagtacctttaccagcatcccagctttccttgcctaattttggatctacagggcaacctctaattgctttgcctcagactcttcagcccccattacagcataccactccccaagcacaggctcagagtctgagtcgtcctgcacaagtaagccagcctttcagaggattaattcctgctggaacacagcatagcatgattgcaaccaccggaaaagtaagtaaagagacatttgcacaggttatttgagaatttaaggtagtgtgttcagatatatgcatctgtgttatctaaaaaactaaaatgcgtcagtttttaccaccctgcaaaaatctcaaaccccagtatatttacattttatctatttacttttaatgtgtttggccccatctagtttttacctaataacaaagaattcacaaatttattggaagaattggatttatagtgtctcttgggcttatttaattataagtctgtttggtcaggtaattccataatacttgaagcctaactataggagttttgtactaaggttctttgccctttcctagattacgtcttcacgtataggacatgtaaacacagcaactcgag

SEQ ID NO: 704 - DNA (cDNA), 663 bp; double-stranded, linear
gaattcggccaaagaggcctaagatggccttcccatgttatggctacatggctgtgataacaagtagagttatgtgtctgcgctctaaactcactgagtcttgcaggatgtaaacatcctagctcagcctatccttgaccaaagcacantcatgctccttacaaactccaaccagcctgcacactgggaggagcgcgtgctgggctagagccacagaattttgtaccgttggcagcagggaggagcctggcccctcctttcctaggtagaatctggaattcaatctgtgaggtgggaagcatatactaggaggactttcactctgctgagtccctgttccccctcccttttttttcctttttgcccaataaacccctttattctcacacttcaaattgtctgtgagactaatcttttgtggccatgtgacatggaccctgtctgtagctgaaactaagaaaaagcccctcccgcacagtctgatgtttcctcagtcagacactgcaagctgtgatgttggggtgagtacaggatatttggcaatatttgcagacagttttggctgtcagagaggaagatgctgtatgcagacacacttgacagcaataacttaagcccaccctgagactgactctgcatggtgatgcacctgaaggcctcgag

SEQ ID NO: 705 - DNA (cDNA), 334 bp; double-stranded, linear
gaattcggccttcatggcctagagcgatgtcaagtgatctgcccgcctcagctccccaaagtggtggaattacaggcgtaagccactgcgcctggccccaagtgtccattttttaatttagtaattctaacctaggtatttttcctgcagtacaaaatgaggataaagctttacatgaaaacatgttgttcctattatgtttattgcagcaaaaacacaacctaaaaacccaatctgagcaggttttaactaaatactaataattctgacactagaacgttatgtagctaacaaaaatatgtcgtaaaaataatcatgtagaaactggctcgag

SEQ ID NO: 706 - DNA (cDNA), 369 bp; double-stranded, linear
gaattcggccttcatggcctaccgagcttcagagcatcagcagtgttcctccttcactgtgacgcttgtcctcacttcccaggtgaggagtctaagaaaacagcctttccatcagcccctgtcgtgacagaccctccagtgggatggtagtggctgcctcacccatttacagggcaacccagttttgctccttctgccttgaaatttgttcctcccagaaactgtccctcacaaggcatgaacaatcaatagaagatatacgtggtcttcccagcactacagctgcagaatgagctgtggagtgccccgtccggagtcctgaacagcttcaaacttttcccctttagaaatgcctaacacgccctcgag

SEQ ID NO: 707 - DNA (cDNA), 365 bp; double-stranded, linear
gaattcggccttcatggcctaggcatccttggtgcggcatccttggtgcattatatcaggaggcaaatgatgtgggtttgtcccattgtttgtaatggtaacattggttgcttggttaaggtgaagggtgccaagcttctccactgtaaagttcctatttttttctctgtaattaataagtaatttgtatgatactttgagataacaaagtagactgttcatcaaactttcatcaatgaatttaacatccaaagacgcctcaagaatgatcatcaaaagcagcctactaatgactgtcatttaccatttaatacatttcaaacagtgcacgtgctctgtgacatattctgggaaggaatctcgag

SEQ ID NO: 708 - DNA (cDNA), 436 bp; double-stranded, linear
gaattcggccttcatggcctacacaaagcttctggaggacaaacgggagcagttgaagaagagcaaagagcatgagaagctgatggagggagaacttgaagctttgcggcaggaatttaaaaagaaagacaagacgttgaaagagaattccagaaagttggaggaagaaaatgagaatctccgagcagagctacagtgttgttctacacaactggaatcctctctcaacaaatacaacaccagccagcaagtcatccaagacttgaataaagagatagcccttcagaaggagtccttaatgagcctgcaggcccagctggacaaagctctgcagaaggagaagcactatctccagactaccatcaccaaagaagcctatgatgcattatcccggaagtcagccgcctgccaggatgacctgacacaagccctcgag

SEQ ID NO: 709 - DNA (cDNA), 383 bp; double-stranded, linear
gctgctctatatcttagagaaaataaaagaaccacatgttgcttccctgcctgcaagctcttctgaattcatcaccattcatgttccttccttcaggggaaatgaaggcagattgttctgttggtgctcacagatctctttctgttctgataccctcctcttcctctcctgcttctttcccttcatcatgtgctcctatacaagtctctcccaactttaaaacaaaaacaaacccttccctaaatcttgtgtttgttccagccattagactgtatcgtccttgccatccacgttattggaagaaggccagctcacctctactccctttctgccctttccctcttaatctgctgtcctctgatttctgcccccacaaactcgag

SEQ ID NO: 710 - DNA (cDNA), 496 bp; double-stranded, linear
gaattcggccttcatggcctaggggcctgaagatcttcgggtatttggctcccagaatctgaccacagtgaagctaaaaggggtgggtgacagcttcaagaagtatcctgactacgagtccaagggcatcaaggctcacttcaacctggatgagagtggcgtgctcagtctagacagggtggagtctgtatttgagacactggtagaggacagcgcagaagaggaatctactctcaccaaacttggcaacaccatttccagcctgtttggaggcggtaccacaccagatgccaaggagaatggtactgatactgtccaggaggaagaggagagccctgcagaggggagcaaggacgagcctggggagcaggtggagctcaaggaggaagctgaggccccagtggaggatggctctcagcccccaccccctgaacctaagggagatgcaacccctgagggagaaaaggccacagaaaaagaaaatggggaactcgag

SEQ ID NO: 711 - DNA (cDNA), 475 bp; double-stranded, linear
gaattcggccttcatggcctagtatggaaggtggaactaaaactgaaatgatcagttcacatatttgtaaactgcgtattttatatcagtcgctggattaggcccctagagacagtggtggctaagtgataaagtctttgcgcttgtggcattttatagtgtagtgggaagacagaaagcaaacaagtagagaatcatatatgtaatgtgacctcaggtccagctaagcgccagacagaagaaaaaagtaaggtgaaggtagaggggttggagcaggaggaaggtgttattttaggtaaagtggccagggaaggccttttgaagaattgatatcgattccaaaatgatgagaaggtgcaattgtgccaccatggaggagaagagctttctaggcagagggcaggtgcaaagatggtaggaacaaacacggcttgttgaaagaacagcaatgtttgaggaatgagccagactcgag

SEQ ID NO: 712 - DNA (cDNA), 608 bp; double-stranded, linear
gaattcggccttcatggcctaattttgcataaaacctcatcaatctctgccaatcactgagcccaaaaccattttcactttgttttaggtatttataataacagcactcccacttctcatgatcaatttccatcttcagcggttcaggctgctttaataaagttccataacctgagtggcttttaaataacggaatgcacatctcacagttctggaggctggaagtccaacagcagagtgccagcataattgggttctggtgagagagctctcttgggtttcagactgctgccttctcaatgcagcttcacatggtggacagaaagagctctcaagagtcatttttaagggcaccaatctaatttatgaagcctccaccataataagctaattacttcccaaagtgctgagattacagctgtcagccaccgtacctgcctgggaatttttttaaagctcaaattggataagagggttataggaatatattcatctatcatatagaaaagaatatgtgctcagtcccaggaaatagaaaatatattaccttatttatactgttttaattaatgctttttaaaatctgattaactctgggagagctcgag

SEQ ID NO: 713 - DNA (cDNA), 531 bp; double-stranded, linear
gaattcggccttcttggcctagtgcactcctgtaatcccagctactcgggaggctgaggcaggagaatcacttgaacccaggaggtggaggttgcagtgacccaagatcatgccactgcactccagcctgggtgacagagcgagaacgtctttaaaaaaattaaaaaaaaaaaaaaaagattgcacaaatcagacagtgacccagagctcagccttgaggaaagtcagtgttggggaggggagggcaaagaagcaagtaaaggtttagcagacatggcacctcagtctggacttgaaggagggctaggcacaaaggaaggggaacatgtcagatgagaaacacgtgaaggttcagccagatgagcaaggaaggttggttagaaagaggagctgctggtgtggctcctgtgaacacaggtagatagggcacgatagagtcaggcagttagaagccaagctgaggaatcgacacttgattccataggtaagtaggggaacttgaggatgtttaatcagaaatgagatctcgag

SEQ ID NO: 714 - DNA (cDNA), 499 bp; double-stranded, linear
gaattcggccttcatggcctaatttatcccatccttatcccatccttataaggaataatgtattgaataaagattgtatcagtatttgtaattcaataaaccagaacttgtggaaataaatatgtaggagacataaatatggtgtcctcaaattgaattatgtgggaaaaaagtggggtggagttaaagtccaagccaataaagttgtaacattaaagaaagacaggtatgggatgcaaggtgcaaagaaaaggtcatcatatctcatactggggtgagatagaagacttcctgaagtaggcgatgcctatattgaatctataaggacaaactggcatcaatatgtcagggaagacaggttgaaggtggtcctgccagagaaaggagcaaggataaaggcaaggaagcatgtaacgtaattgtttgtggagaaacctcaaatcggctgaggaaaaacgactcaggtatgtagtagggcacagtataagtaggtctcgag

SEQ ID NO: 715 - DNA (cDNA), 430 bp; double-stranded, linear
gaattcggcttcatggcctagagatttaatgttcccttaccttgctggaggaacatcaatgttggaggaaacaacttttcttttttgctcaaggagacagatggagcgagtgttttctttttcatggtcaaggatccggctggcttttttggtgtctgctgttttcacatcttcctccatggccaaggaaaacacgtgttgatgagacatttttttaccacagtcacgttttaagtcctctgactgaaatgtgaaggtcatttcccgcttaatgctccccacctgtgaaatgaaacacagaaattcttactcacataaaacatcacctttgtacgactactgcagatggcggtgaggagagattacagacactgtccttcctgttcatctgaaagattgtataattttaataagaaaaatgcaactcgag

SEQ ID NO: 716 - DNA (cDNA), 471 bp; double-stranded, linear
gaattcggccttcatggcctagaccttctgggtgaacgagggcaagcacgccaagttccgctgctacgtgatgggcaagcccgagcccgagatcgaatggcactgggagggccgcccgctgctcccggaccgccgccgcctcatgtaccgcgaccgcgacggcggcttcgtgctcaaggtgctctactgccaggccaaggatcgtgggctctacgtctgcgccgcgcgcaactcggcgggccagacgctcagtgccgtgcagctgcacgtgaaagagccccgcctccggttcacacggcccctgcaggacgtggagggccgtgagcacgggattgccgtgctggaatgtaaagtacccaactcccgcatccccacggcctggttccgtgaggaccagcggctgctgccctgccgcaagtacgagcagatcgaagagggcactgtccggcgcctcatcatcacaggctcgag

SEQ ID NO: 717 - DNA (cDNA), 397 bp; double-stranded, linear
gaattcggccttcatggcctagccactcttagcaacacagattttcttccaaattatgccttgaagctgctcccggagccacccgctcatcagcaccctgctcctgtggtccttctcgtgaaaggcagaggggagatgcctgttgcccgcagtcttctctgcagctgccgtgggaacaggcaccttcccggctgctggggacacaaggagggggagtcaccgtggcttgctcactttccagatcagccaactgcagaacatttgttgttgtttagatcccacgtctgacggtttagaacagcttttataacatggttaaacatgtttacaaagcaagggagacatctcttaccttgacaacacgaggctcccacagaccgccttcccccagctcgag

SEQ ID NO: 718 - DNA (cDNA), 539 bp; double-stranded, linear
gaattcggccttcatggcctagaaggaaagaaattttatgtgagagagcatcttgtatggcaaattcttgtcctaaagtagaatgactaggaaagagcaaaatataggacaagtcagaaagtcataagatgggaaagaaaaacttacaactgctagatcttctcctgtctagaagtgttgtgtgtgtgatgcttatatgaaggtactctaattaattggattaagagaaaatgaaaccccatctctactaaaaatacagaattagccgggtgtagtgacacatgcctgtagtcgcagctactcagcaggctgagacaggaagataactttaacccaggagttggaggctgcagtgagccaagatcgcgccactgcactctagcctgggagagacagagcgagactccgtctcaaaaatgaaaaagtagagcctggtagagtgaagccacttgcaggagtcgtttagttagggctgtgttgccttacagtgctggtgtcctcacagatgataatagtaataaaaaacaccacaactcgag

SEQ ID NO: 719 - DNA (cDNA), 387 bp; double-stranded, linear
gaattcggccttcatggcctaggcagtggataattgtcctctggaggaaccatctgtgacacattctacatggttccttagagggtccccaagtgggattgagtccctcttgttcctagcagtaagcagttctgttatacactctttatatgcttttcctcctttcctctctcagtctctctgatccttccacctgtgctctgggttcacctctcaagtaaaccacctgcacacaagtccctgtctcaggctccatttggggaaaccaaactaagacaccacctcaaaacacagaatttcacgaggctccaaatgcctcagaaaagtaatgtaaatataaaatgaccaattttttgaagtatattaatcctagttatttaactcgag

SEQ ID NO: 720 - DNA (cDNA), 239 bp; double-stranded, linear
cccgtgtatagtttgcaaatattttctcctcttctgtaggctgtttactcttgttgatagtttcttttgccatgcacaagctttttggtttaattagatcccatttgtcaatttttgcttttgttgcaattgtttttggcgtcttcatcacgatatctttgccagttcctatgttcaaaatggtattacctaggttgccttccagagtttttatagttttgggtttttatttactcgag

SEQ ID NO: 721 - DNA (cDNA), 323 bp; double-stranded, linear
ctcgagcactaccctagacggtctcatcactatactggctcctccttacccccgtaaatctcccaggtacacttcctgatcaccctccggatacctcatccctatctattccttttataaataattccctgctcctccttctcacccacaatccactcgcagttcaaggcctcactgccatcgactccactgtctgtgagtgcttcccaatatgccccaggacccctcctggtgtcacgctctgtatcctgacaccccttgtagacgagtcccgaaattcccgccccgtccctggagctccctaggccatgaaggccgaattc

SEQ ID NO: 722 - DNA (cDNA), 275 bp; double-stranded, linear
gaattcggccttcatggcctaggcctgtggagccccagctctgggtccctagcccgggtccaggcagccaggctccctcctgagctgagaaacggaacctcgcgaaccactggtggcacatccttctcctcccccgcccctgatcacccgcccccggatcagaaatatatctatattctcgactaaagtctcatcaggaaatatttcctgtcttttattttaagcatcaaattgttttagttgatttaaaaaggaaaaaatacagacgactcgag

SEQ ID NO: 723 - DNA (cDNA), 317 bp; double-stranded, linear
gaattcggccttcatggcctaagaagcaacaatcatattagctgggggaggaggatagtttggtatttttgtagtttgcacagtgacctttttaaaaatctggttaggcaaaaatagtgtgatcttgtttgttgtctcacttcattatgatcacagaatgacctggtatgatgttagtgttttatgagagtgttatgttttaacaggggaacaccgcagtcaattcctaacaacactaaagtgtcagttctgttcgtgacaccaagggctgtttttctttttctcatataatgttgaggcaaccaggaagactcgag

SEQ ID NO: 724 - DNA (cDNA), 267 bp; double-stranded, linear
ggcctcagcaggtgtgaagcgtgtgctttagtttcgtgggaggcctggcatccccgagagggaggggaaaggtaaccactcctttgtggaggtcgccagggtcattgtcgtggatttgcacagtcggctgggcggtgcaatggcggaaagaaaaggaacagccaaagtggactttttgaagaagattgagaaagaaatccaacagaaatgggatactgagagagtgtttgaggtcaatgcatctaatttagagaaagcagactcgag

SEQ ID NO: 725 - DNA (cDNA), 354 bp; double-stranded, linear
gaattcggccttcatggcctaagtcagtggtaagccgcagcagtttcctgccactcgtaatatggcaattaaaaattttaaatttgtggctgcttggggtctgggaggtgacctgctcctcagcaaattttgactgataaattaatgcctgggtcttcagcctggttctttgctggccagtgtgacaacagtctgtcacgtctctgggggcacattataattaacagatgtaatctttctccggttcagggtcatctgtgaatcaggggtactgccccagtagaactaggaacatccagcaaaagactgttttcaaaatatacaattaagtgaaaaaagcatgaagaactcgag

SEQ ID NO: 726 - DNA (cDNA), 154 bp; double-stranded, linear
gaattcggccaaagaggcctagaggttgacctgaaaaacaatgaaacacatgaacacacttccgattttctcctcgctgattagcttcctgcctgctgtcagtgctggacgaagtgctataactactttatgtaacattacagaacagctcgag

SEQ ID NO: 727 - DNA (cDNA), 338 bp; double-stranded, linear
gaattcggccttcatggcctagtgggaagatgtggatgatgagaagggagatagcaatgatgactatgactctgcaggcctattgtcagatgaagactgtatgtctgtgcccggaaaaactcacagagctatagcagatcacttgttctggagtgaggaaacaaagagtcgcttcacggagtattcgatgacttcctcagtcatgaggagaaatgaacagctgaccctacatgatgagaggtttgagaagttttatgagcaatatgatgatgatgaaattggagctctggataatgcagaattggaaggttctattcaagtagacagcacgactcgag

SEQ ID NO: 728 - DNA (cDNA), 433 bp; double-stranded, linear
gaattcggccttcatggcctaattgaattctagaactctcccagagaaaccaggcagatactgctccacaccggtgagctgcttctcacctgggtagtctagggtggtttgctccagaattgtatttctgctttttctttttttaacttggcagtggttaaccattccctggagcagcaccaggtaagtcagcttgtatcagagtcatctgctttacctgacatgagcacacgttgtcatatatttgcacatgcagatatcatatgttaaacaatatcacattgttgaagaaaattacactggaaagcgtaaaatatagtttggatgccatattgagtgtaacttaatccacccgattcagaacttttgtagagtgcctcggagttcctatttggaaatatcagttagcagttttagtcagtagagactcgag

SEQ ID NO: 729 - DNA (cDNA), 315 bp; double-stranded, linear
gaattcggccttcatggcctaacaagaaacaccaagtacctcgacctcaagaattcacaagagatgctccgctacaaagaggtctgctactacatgctctttgccctggctgcctacgggtggcccatgtacctgatgcggaagcccgcctgcggcctctgccaactggctcggtcctgctcgtgttgcctgtgtcctgcgaggccgcggttcgcccctggagtcaccatcgaggaagacaactgctgtggctgtaatgccattgccatccggcgccacttcctggacgagaacatgactgcggtgggactcgag

SEQ ID NO: 730 - DNA (cDNA), 156 bp; double-stranded, linear
gagttgtctctctgaattaactttctcaccaatagctcctctttaagatcaataactcttatgtttgcactttttaggctattttctagatcttgtatgtgtgtcttattattttttattctttttgtctcctctgtgaattttcaaatagtcgag

SEQ ID NO: 731 - DNA (cDNA), 223 bp; double-stranded, linear
gaattcggccttcatggcctacttgaacctagatctcacccccaggatgttgcggaggctgctggagcggccttgcacgctggccctgcttgtgggctcccagctggctgtcatgatgtacctgtcactggggggcttccgaagtctcagtgccctatttggccgagatcagggaccgacatttgactattctcaccctcgtgatgtctacagtaacctcgag

SEQ ID NO: 732 - DNA (cDNA), 309 bp; double-stranded, linear
gaattcggccttcatggcctaaattattgcaaagtgtatattggttaaaaaaaaaaaggaggaagaggcagtttttcatgacggttaaaagtgcaggatttggagtcccatggtcctgggtgtgaatcctggctgtggcactaactatctgtgtgactggctgtgaacctctcgtgcctcactttcttcatctgcaaaatgggtagttgtatagcaaatgcacatagagaacacttaacactttggcacattggaagcactcagtaaatgttaattgttattattgttgctctaaagagaatcctcgag

SEQ ID NO: 733 - DNA (cDNA), 275 bp; double-stranded, linear
gaattcggccttcatggcctagattaattctagacctgcctcagctccactccttatggtttgccaccataacctacaacatttgtccgtccaccccacgtgtcttcttcctttgtggcaggaactcttatctctgcctaccaaccaattggtcaggagcatgcaccctagtgtctcaatctccagacattaacatcctgccaaacaaccagaccatccaggttcctttagtgacccctatctcatcctcttccacatgcagtaggcaggtctag

SEQ ID NO: 734 - DNA (cDNA), 250 bp; double-stranded, linear
gcagatcagaggcacgtttcccacaactgcgaagaggcgctgaggcaattctgcaagaagattttggggttttggaaaagaagctatggaaaacggaggggcaggcactctgcagataaggcaagtcctgcttttctttgttttgctgggaatgtctcaggcgggctctgaaactgggaactttttggtgatggaggaattgcagagcgggagctttgtaggaaatttggcaaagaccctgggactcgag

SEQ ID NO: 735 - DNA (cDNA), 324 bp; double-stranded, linear
gaattcggccttcatggcctacacagactgggcaatttataatgaacagaagtttatttggctcttgggtccagaggctaggaagtccaagagcatggtgtcaagcatcaggtgaggatcatcaccccgtggtagaagatggaaggcagaagtgagcgtgtgagacagagagggagaattggactcaactcatccttttaatcaggaacccactctgtcagtaacgaacccatccccacaataatggcattaatccattcatgaggcccctacctctttttctccccccgccccccgagatggagttttgctcttgagctcgag

SEQ ID NO: 736 - DNA (cDNA), 259 bp; double-stranded, linear
gaattcggccttcatggcctaaacacataccagattcttagattcatttggtgaaggaagcctctgaattaaaacttttaaatatttctgatttgcaaccagacgaaaaagaagaaaattgacaacttttttgatgcaactttgtgaaatcatggtgttcctggtttttctggtctggtttttgttgttgttttgttttgttttgccacagtttagttcctcacctgatctttccttgtatccacttcagagtctcgag

SEQ ID NO: 737 - DNA (cDNA), 409 bp; double-stranded, linear
ctcgaggcggtgccagacacgggtctcctccgactgggcggtgcgtgggatgccgccagcgtccaggtactgcgtgatgcggatgtaggcgatgcaggctgactcgtcgcccatcaggtggatgtggggattcaggatggtggtgtgcacgggcttgctgttccgggaccacaggttttcaaaatagaatcgatggaagtccaggccctcaaccaggttccccagggcctcaggttcgaaggctgtcatgccagggtcgcacatcttcgtgtaggactcaaaatctccattgcttatggcttcaatcagctgctctgtcacttttataatttcctgtttccgcactttggtgtcttcatcctcgatggtggtgttggtgctctctgagtaggccatgaaggccgaattc

SEQ ID NO: 738 - DNA (cDNA), 466 bp; double-stranded, linear
gaattcggccttcatggcctactttcccctccttccttccttccttcctccctccctcctctctcctctctttcttccttccttgcctccttccatccttccctccctctctctctttctttctttctttctctctctctctctttctttctttctctctctctgtctttctttctctctttctttctttccatcttcttttctttctatctttcttacttttgatgtagctgtcacgacctaatgaaaatactggcatgagtgatgccacctttagattctccaccttcctgttcctgtcctattcaccaacatgaattggtttgtggctgtaagtacttggtgggttattgctcatagattcagttgcatttttgctgagatagtgctgttaccaaaagcaggggtgctgcttgaagaagtaaacctaactctgaaaaatagagactctccagaaacactcgag

SEQ ID NO: 739 - DNA (cDNA), 367 bp; double-stranded, linear
gaattcggccttcatggcctacattctgcaaactattttgttattagctttttcacttaaaaatagccctgcttgcaagcaggctctgtggtgcaatggatagcgcattggacttctagcctaaatcaagagattcaaaaatagccctgctaaatatttgcaatctttcctacgctcctttttcccccaaagtgactttggatatccagagttaccaaatctagtatttgaagtccttaggtttgagggttgaaagtgaaaggcaagctgttttaatgaaaattcctaactgaagagagcggagacttaagatgcttaaattttggtcacacctgagcggtatttgtttgcatggcaggagctcgag

SEQ ID NO: 740 - DNA (cDNA), 264 bp; double-stranded, linear
gtgatggacaaagacagggaaggcctcatcagcagggatgagatcacagcctacttcatgagagccagctcaatctattccaagctgggcctgggctttcctcacaacttccaagagaccacctacctgaagcccactttttgtgacaactgtgctggatttctctggggagtgatcaaacaaggatatcgatgtaaagactgcgggatgaactgtcacaaacaatgcaaagatctggttgtgtttgagtgtaagaagctcgag

SEQ ID NO: 741 - DNA (cDNA), 318 bp; double-stranded, linear
gaattcggcctcatggcctacacgaccagcaccgccactgccacctcacagcctttcctcttcggggcgccccaggcctctgctgccagcttcaccccggccatgggctccatattccagtttggcaaacctcctgccttgcccacaaccaccacagtcaccaccttcagccagtccctgcccactgccgtgccaacggccaccagcagcagcgctgccgactttagtggttttggcagcaccctcgccacctccgccccggccaccagcagccagcccattctgacgttcagtaacacgagcacccccggcctcgag

SEQ ID NO: 742 - DNA (cDNA), 256 bp; double-stranded, linear
gaattcggccttcatggcctaagaaatgaaaaagattattgaaactatgccaatgactgagaaagttgaagaattgctgcgtgtcataggtccattttatgaaattgtcgaggacaaaaagagtggcaggagttctgatataacctcagtccgactggagaaaatctctaaatgtttagaagctgaaagcagtgacagtggagccgagtctgaggaagaagaggcccaagaagaagtgaaaggagcagccctcgag

SEQ ID NO: 743 - DNA (cDNA), 580 bp; double-stranded, linear
gaattcggccttcatggcctatgtttttatagcaccgatggtactgttttatttattgccaatagaccacaacattcacatctgtttttcctcaagggaaccgtatttgcttttggttgaaggatttatctatttgatactatccagaatattgtgaagctataatttcctgggttatattttagatgggttgtctgcatggtggtaaaataagctttttcctctcgcctacgtcctttggaagatctcctgatcatacataactaggtagggcttattcttgctgccggagcttggcacccagctctagactgtttctttgagcattactgcagattggagacgtgtgtgagaggagcagcgctcagaaatagggcttgaggctcaagcagaaactgaagctctcattcaaatgaagatgctctctctaccgcacgatcggcagtgagaaaaggaggatgaaaatccttctcatcacaaagagcttgaaggaacccacgtccccagattagcaaccctagagttcatctgctcaggccgggaaatgtgtaagcttccttgatcaactccaggcctcgag

SEQ ID NO: 744 - DNA (cDNA), 374 bp; double-stranded, linear
gaattcggccttcatggcctacccagagactcgcggacgctcacgataaccaaggacgaccgcgaaccaagggcaaaataacatggcagccagacgaattacacaggagacttttgatgctgtattacaagaaaaagccaaacgatatcacatggatgccagtggtgaggctgtaagcgaaactcttcagtttaaagctcaagatctcttaagggcagtcccaagatccagagcagagatgtatgatgacgtccacagcgatggcagatactccctcagtggatctgtagctcactctagagatgccggaagagaaggcctgagaagtgacgtatttccagggccttccttcagatcaagcaacccctctcgag

SEQ ID NO: 745 - DNA (cDNA), 323 bp; double-stranded, linear
gaattcggccaaagaggcctattggtttccctgcttccattcttactcccctacactctgttctccaaaaaataaccattgtgatcctttaaaatcctgactctctcctgctcagagtcatccagtggcttcccatatcacgtaaaatgaaaccccaatcgctccttactctggcctgcaggggcctgtgtgatgggccttctccagcttcgttcttcctttccttctgttctcccctctgcttacctactccatctccagggcttctttccagctcaagccctttcctgttgagagcatttgctttccccagggcactcgag

SEQ ID NO: 746 - DNA (cDNA), 273 bp; double-stranded, linear
gagaacagtgttaccaaagaaaaggacatgttcaatttcaaacgagcccaggaggacatctctagacttcgcaggaagctggagaccacaaagaaaccagacaatgtacccaagtgtgatgagattctgatggaagagattaaggattacaaggcacgcttgacctgtccatgctgtaacatgcgtaaaaaggatgctgttcttactaagtgttttcatgtcttctgctttgagtgtgtgaagacacgctatgacaccccccccgcgctcgag

SEQ ID NO: 747 - DNA (cDNA), 666 bp; double-stranded, linear
gaagatcttcgctgtcctctctgcctctatcacaccaaatacaagcgcaacatgattgaccacatcgtgctgcaccgagaagagcgtgttgtccccattgaagtttgccggtccaaactgtccaaatacttgcagggagtagttttccgctgtgataagtgtaccttcacctgctccagtgatgagagcctccagcaacatatagaaaagcacaatgaactgaaaccttacaaatgccagctctgctactatgagaccaagcacacggaggaactggacagccaccttcgggatgagcataaggtaagccgtaactttgagctggttggacgggttaacttggatcagctggaacagatgaaggagaaaatggagagctccagcagcgatgatgaggacaaggaagaagaaatgaacagcaaggctgaagacagagagctgatgagattttctgaccacggggctgctcttaacactgagaagcgttttccatgtgaattttgtggacgggcgttttcacagggctctgagtgggaaagacatgtgctgagacacggcatggcattgaatgacaccaagcaggtgagcagagaagaaatccacccaaaagagatcatggagaacagtgttaaaatgccctccatagaggaaaaggaaagtctcgag

SEQ ID NO: 748 - DNA (cDNA), 379 bp; double-stranded, linear
gaattcggccaaagaggcctaacaaccgaatatagtacacgaccttcctgcagcagttctaagctactgtcaagtatggaaaatcccggcaattctgtacttgtgttatactgatgtgatgaaattagacctaatcacagtggaagcttttaagcctatactttctaccagaagcttgaagggtttggttaagaatattccccaaagcactgagatactaaagaaattgatgacaacnaatgagattcagagtaacatttatacatgatcttaaacattgttttgtagtgtatattacttgtccattcctttaaggggagcagcctgcactcttttgtagattacttttgggggatatattttgagaatgatgaaacgg

SEQ ID NO: 749 - DNA (cDNA), 335 bp; double-stranded, linear
gaattcggccttcatggcctaggcgcaaggccgagcgttcccagcagggggagaaacccttcacaccccaggcccttcaggaactggggccttgccttgcagccacatggccccatcccagttggggaagccaggtgagctctgacccttgggcctgggcctctgcccctcccaacccagccctcgtctccctcgacagcgcccctgctgtcttccccaccgcagtcaccaccacccgaaatgccacgtggtcactgtgcactgccctgttcatgtgcctctgcggggcagggccttcctggttttgttcactgctgtacccagatagcctcgag

SEQ ID NO: 750 - DNA (cDNA), 648 bp; double-stranded, linear
gcaaagacccaagaactgaatatgctccgggaacagaccactgggctggcagctgagttgcagcagcagcaggctgagtacgaggaccttatgggacagaaagatgacctcaactcccagctccaggagtcattacgggccaatagtcgactgctggaacaacttcaagaaatagggcaggagaaggagcagttgacccaggaattacaggaggctcggaagagtgcggagaagcggaaggccatgctggatgagctagcaatggaaacgctgcaagagaagtcccagcacaaggaagagctgggagcagttcgtctacggcatgagaaggaggtgctgggggtgcgtgcccgctatgagcgtgagctccgagagctgcatgaagacaagaagcgtcaggaggaggagctccgtgggcagatccgggaggagaaggcccggacacgggagctggagactctccagcagacagtggaagaacttcaagctcaggtacattccatggatggagccaagggctggtttgaacggcgcttgaaggaagccgaggaatccctgcagcagcagcagcaggaacaagaggaagccctcaagcagtgtcgggagcagcacgctgccgagctgaagggcaagaaggaggcgctcgag

SEQ ID NO: 751 - DNA (cDNA), 266 bp; double-stranded, linear
ggaaagaatctaaaagaagagaagcgaccggtgcttttaagggtgtctaattttcaaaagagacgtctgggagtattttgctctgggcgtttgggtgagcaggaccggggcgttggagggtgcggcgggcttgggagcagggaaggttccgagtcctagggaggcggcagcgctcggctatgccctctggagactggcggggctgcggggccgaggggacccgcgagggagccgcgctgcggacgcgctgagcgcgggagctcgag

SEQ ID NO: 752 - DNA (cDNA), 288 bp; double-stranded, linear
gaattcggccttcatggcctaggatgttttaaggctaggcctgagcgaggaggaggcaggggagacctggcaggtattgaagtacctgggaagaaaggcaatggggatggtggtcctgctccaagatgataagtggaggctgagcgtcactggtactgggggccatgatccccagggccaccctggcaccagggtgcaggggatgcggggcctgagcaggaagaacagagatctgcgggctgcaccgacccatccctgcccctaggctgaagaacggcatcactcgag

SEQ ID NO: 753 - DNA (cDNA), 487 bp; double-stranded, linear
gaattcggccttcatggcctactgaatttgcttttcttgcctctctttagtcacctgtcacaggaggttcctgctcagtaatgatattgtgagttaggataataacttttttttttttgtgcttcagatttagaagaaaagatcctgtttccatttgaaaggaactgtaagcttttatcttttaaccaactgaacaatacaccaaaagcagcctagggatgagcatttctttgaaagcaattaggttattcacctggtattaaaactatttactgttaaaaaatctgtgacttcatgaagttgatttttaaaggcagcatcaaaaactgaaaaggaagggaaaaaataggcagcttctctgcacttgtttggagctccccaaaacaggagccatggagaagtggcatcaagaccgggctgccctttcgagaacaccctgtggcagttcagagacacgcttttcctacactgcatgcagccgctcgag

SEQ ID NO: 754 - DNA (cDNA), 443 bp; double-stranded, linear
gctgggtttaggcgatcctcttgcttcagcctcccaagaagctggagccacaggcatgcaccaccacgcccagttaatttttgtattttttgtggggacggggtctcactttgttgcccaggcttatctggaactcctggtttcaggcagttctccttccttaacctcccaaagtgctgagattataggtgtgtgtgagctatcacacctggcctagaaaattataagaaaatattaatcacataatctcactacccattgatgatttaacatctagtatatacatatgtatatataattttaaaagtagggttatattatataattacttcattattcttgttttccacttaatatacttaagatatctttcaaaatcactaaatacaggaacatagtatatcatctttcagtagcctcattgtatagctaaccccctcgag

SEQ ID NO: 755 - DNA (cDNA), 584 bp; double-stranded, linear
gaattcggccttcatggcctattgatttcctgggctcaggagaggatggggaaggggctccagaccctcggcggtgcactgtggatgggagcccccatgagctggaaagccgtcgggtcaaactccaaggcattctggctgacctgcgggatgtggatgggctgcccccaaaagtgactggcccgcctcctggcacaccccagccccggccacatgaaggttcctttggcttctcctcagacgtcttcatcatggacactatcgggggcggggaggtgagcctgggggacttggcagatctcaccgtcaccaacgacaacgacctcagctgcgatctgtctgacagcaaagatgcttttaagaagacgtggaaccccaagttcaccctgcgctcgcactacgacggcattcgttccctggccttccaccacagccagtcggctctgctcaccgcctccgaggacggcacgctcaagctctggaacctgcagaaggcggtcacggccaagaagaatgcggcgctagatgtggaacctatacatgctttccgggctcacaggggcccagtgttggctggactcgag

SEQ ID NO: 756 - DNA (cDNA), 285 bp; double-stranded, linear
gaaattaaaaaaataaaatcaagttcttgggtggtgggaaattggcctgtattttttcttctcagtggaatttgctgagtaaaaaattataggctcaaaaactgagaactttgaagatattgcaccatattctttttgtattgagtgttgctgatgagaagtctgaggtcagtctgttgcttgctctttctaggtaaactgtgctttttatattttttcccctctagaggttttgagaatttactccttatccatgttattcttaaatttcaccacattctcgag

SEQ ID NO: 757 - DNA (cDNA), 310 bp; double-stranded, linear
gaattcggccttcatggcctagaatgctttgaatccatatctttttcagaaacatacatggaaatacagaactacacctgtaattacagagggcatatgaaccctagtttgataagccttgctttaaaggatgcagtgtgttctattaaatgtatttaatacaattgcagaaatggaaaatgtggacctccattaaacaaattttttagttcctaatgagataaacttgggaccaaaccgattcctcttgttttagtgctcaaaaatagtttcatttttaggtatttatgctttagtggcctttctcgag

SEQ ID NO: 758 - DNA (cDNA), 196 bp; double-stranded, linear
gaattcggccaaagaggcctaagaaaagaaagcaagaacagaaaacgaagccacaggaagggaagtagacattgtatgcttatggtttctcattatgaaggtgcagcttgtaggaggtttgtacggatgtgctttgaagttatgtatattacatataacaggaaaaaatattaaaataaacagtgctggtctcgag

SEQ ID NO: 759 - DNA (cDNA), 360 bp; double-stranded, linear
gaattcggccttcatggcctacagcaaatctgccttcacatggtctgcattctagtggagaagtcagatagaggtaagtacgaagaccacaaagcaggttaaaaagtaaggtgggaaagggatgctattttagacaaggtggtcagggcaagcctctcagaagaggggataagtgctcagagacctgactgaagtgagagtgagctattgacacggagaagggcatttcagactctgaagagaaagcaggggcaggctttggagggagagcttgtttatgtagacaaggaggggcaaagagtcttgtggataaagcagaatgaacaagagtaaatgggattgtaaatgaaatgactcgag

SEQ ID NO: 760 - DNA (cDNA), 192 bp; double-stranded, linear
ggacatatgcagtcaaaagtaggtgcccatatatataatgaaataccaaaaggacaatttagaaggttgaatggaaacattatggcatgctttagacgttctgttttggttttcttattcccagtctttgatcttttaggtctatccattggtaaagatatattaggactcacatcaactcaaggtctcgag

SEQ ID NO: 761 - DNA (cDNA), 326 bp; double-stranded, linear
gaattcggccttcatggcctagtttattgctcccaactatacatcttcagacttcacttagcatgttacgggtggttaggttccaggattattgagatctatttctactcacaattgcttataaaatgaaatctatcgtcaccttaattgcctgtgcctaaaaatatagcatgcttgtcttgtgggaaatattcagcctggtatgtgagtgactgaaatgcaactccgtggaaacaccccaactccacacattcatccccttggtaactcagcacagtcacagaaactgaagaagtaaaatgatcctctttatttggcttctcgag

SEQ ID NO: 762 - DNA (cDNA), 205 bp; double-stranded, linear
gaattcggccttcatggcctactggcccaagtgaaacttttaacaggctttttggagatctctttagctagatccaaaaattcatcaggtatattttctgttttccaagttcatgcaggcaatagctttgctaatatataatactagttgccttgttcaagctgccatatcagtttcatcactcctttcccagtgcccactcgag

SEQ ID NO: 763 - DNA (cDNA), 285 bp; double-stranded, linear
gaattcggccttcatggcctaaaaatgaatatattcctatcctatattaagacactttccctaacctaaaagtttattctgtttttaaaataaatgaaagtatttgtatgggccctgggcctgacggagatatgccctgccccctctctagagtgctgggaattctcaggtgacccagtcccacaggcagccaagtgcccacacatttccaggctgccctccaccagggcagcgacctcgggtcaccagggacacgcacacctagaaagccgtgggctcctcgag

SEQ ID NO: 764 - DNA (cDNA), 345 bp; double-stranded, linear
aattctttatcatttcagatattaaggatttcagattttaagagttatcagtgaaactgtgttacaagaatattttgttcctgagacatctcagtattataggtggcttcagactaacaggcacagaataggatagtgtgaagtatctgattagctttactgtacttggtacctttaggacgttcagccagaggtgattggagggatttgcacgtctaccactcgtgtgtgtatctgtgaaccatatctcctttagtgcctgcttttgaactttatataaacagaatgatgctgcctgtttatctctataattttcttctttcccttagcacgtgctcactcgag

SEQ ID NO: 765 - DNA (cDNA), 100 bp; double-stranded, linear
gaattcggccttcatggcctagagaatgttttcatgttacttatactaacattagttcttctatagggtgatagattggtccaattgggtgtatctcgag

SEQ ID NO: 766 - DNA (cDNA), 333 bp; double-stranded, linear
ggattgaattctagaccctgcctcgtcattgtggaacccatggagcagtttgatgatgaagatggcttgccagagaagctgatgcagaaaactcaacaatatcataaggaaagagaacaaccaccacgttttgctcaacctgggacatttgaatttgagtatgcatctcgatggaaggctcttgatgaaatggaaaagcagcagcgtgagcaggttgatagaaacatcagagaagccaaagagaaactggaggcagaaatggaagcagctaggcatgaacaccaattaatgctaatgaggcaagatctaatgaggcgtcaagaagaactcgag

SEQ ID NO: 767 - DNA (cDNA), 238 bp; double-stranded, linear
gaattcggccttcatggcctagataatattttatgttcattgtgtgttagactgtgttgaagtggaaactttggaacattgttggaaccagtaagaatcccattcctcaggtatcaggtcgttaaagtagtttaaaataacgtattccttaattttcctcagcaggttccccctccctttaacttgtgtgtataaatatatgtgtgtgatgttttctcttacaaagatagtactcgag

SEQ ID NO: 768 - DNA (cDNA), 234 bp; double-stranded, linear
gaattcggccttcatggcctagggatcccaccttttacatcctaggtgtgaacagattcaaatccactattcctccagattttatagatgaggaaaccaaggtgcacaagagggatttttttgttttgttttttgtttttgtttgtttttgagacaggattttgctttgttgcccaggctggaatgcagtggcacaaacatggctcgctgcagtctcgaactcctacgctcgag

SEQ ID NO: 769 - DNA (cDNA), 291 bp; double-stranded, linear
gaattcggccttcatggcctacggaatgagaagatgaaaaatcaaattaagcagatgatggatgtctctcggacacagactgcaatatcggtagttgaagaggatctaaagcttttacagcttaagctaagagcctccgtgtccactaaatgtaacctggaagaccaggtaaagaaattggaagatgaccgcaactcactacaagctgccaaagctggactggaagatgaatgcaaaaccttgaggcagaaagtggagattctgaatgagctctatcagcagaatctcgag

SEQ ID NO: 770 - DNA (cDNA), 432 bp; double-stranded, linear
cgctgcgtgcttgtgagactgcctgttctgggaccagcccctgggctcttccaccaagatttggtgagggtccccctctgcctctcacagaagcccctggccctggactgtcctgggggcagggacacctgtggctggggaagggatggccaacagcgggaagcagtttgcgcctggtgcctgatgatggtgaaccacgagacagatggagacgggagtcaggggaccctggggacccttccaggtccagtgaccttttcccagacaggcactctccaggcctaggacagacagggccccaactcctcatcaccccatgacttggcctggaggaacctggggtgggaaacaagtagtcccccaacctcagaggccagaaccacaggtgggggacagggacctcgacagagctgtgcctgctcaacgctcgag

SEQ ID NO: 771 - DNA (cDNA), 399 bp; double-stranded, linear
ggtgtggctttgccccgtacgagcggcgcgccatggagttactgaaggtctccaaggacaaacgggccctcaaatttatcaagaaaagggtggggacgcacatccgcgccaagaggaagcgggaggagctgagcaacgtactggccgccatgaggaaagctgctgccaagaaagactgagcccctcccctgccctctccctgaaataaagaacagcttgacagaagccctggctctcctgctgtccgtgggtgggtgtgggtgtgtcgggggcccgcagtcccctgtctggtgcccgctctgagccacaccctctccgggtgctgcctggtcgtgaatcaaaagccgtggcccgcccacccttcccggggcagcaggtgaggaagccgctgtactcgag

SEQ ID NO: 772 - DNA (cDNA), 520 bp; double-stranded, linear
gaattcggccttcatggcctacaagaaaaaagaaaagaaatcattaaccccagctgtgccagttgaatctaaaccggataaaccatcgggaaagtcaggcatggatgctgctttggatgacttaatagatactttaggaggacctgaagaaactgaagaagaaaatacaacgtatactggaccagaagtttcagatccaatgagttccacctacatagaggaattgggtaaaagagaagtcacaattcctccaaaatatagggaactattggctaaaaaggaagggatcacagggcctcctgcagactcttcgaaacccatagggccagatgatgctatagacgccttgtcatctgacttcacctgtgggtcgcctacagctgctggaaagaaaactgaaaaagaggaatctacagaagttttaaaagctcagtcagcagggacagtcagaagtggtgctccaccccaagagaagaaaagaaaggtggagaaggatacaatgagtgatcaagcactcgag

SEQ ID NO: 773 - DNA (cDNA), 129 bp; double-stranded, linear
gaattcggccaaagaggcctagtttattgtttgcatatattttatagtgtagagattaggcattttaataaaattttaaaatttccaggatcttacagaatgcttttatgttacagcttactcctcgag

SEQ ID NO: 774 - DNA (cDNA), 337 bp; double-stranded, linear
gaattcggccttcatggcctacacaacggaaagctgtttttctgatcgaggctctctgaagagcataatgcagtccaacacattaaccaaagatgaggatgtgcagcgggacctggagcacagcctgcagatggaagcttacgagaggaggattcggaggctggaacaggagaagctggagctgagcaggaagctgcaagagtccacccagaccgtgcagtccctccacggctcatctcgggccctcagcaattcaaaccgagataaagaaatcaaaaagctaaatgaagaaatcgaacgcttgaagaataaaatagcagattcaaacaggctcgag

SEQ ID NO: 775 - DNA (cDNA), 276 bp; double-stranded, linear
gaattcggccaaagaggcctagtgagcgcgaccatcatgtccatgctcgtggtctttctcttgctgtggggtgtcacctggggcccagtgacagaagcagccatattttatgagacgcagcccagcctgtgggcagagtccgaatcactgctgaaacccttggccaatgtgacgctgacgtgccaggcccgcctggagactccagacttccagctgttcaagaatggggtggcccaggagcctgtgcaccttgactcacctgccatcaagcaccag

SEQ ID NO: 776 - DNA (cDNA), 586 bp; double-stranded, linear
gaattcggccaaagaggcctatgaaatagaagaaggtaaaaataaggaacaagcaataaacagttcagagaacataatggacatcaatgaggaaccaggaacaactgaaggtgaagaaatcactgagtcaagtagcactgaagaaatggaggtcagaagtgtggtggctgatactgaccaaaaggctttaggaagtgaagttcaggatgcttctaaagtcactactcagatagataaagagaaaaaagaaattccagtgtcaattaaaaaagagcctgaagttactgtagtttcacagcccactgaacctcagcctgttctaatacccagtattaatatcaactctgacagtggagaaaataaagaagaaataggttctttatcaaaaactgaaactattctgccaccagaatctgagaatccaaaggaaaatgataatgattcaggcactggttccactgctgatactagcagtattgacttgaatttatccatctctagctttctaagtaaaactaaagacagtggatcgatatctttacaagaaacaagaagacaaaagaaaacattgaagaaaacactcgag

SEQ ID NO: 777 - DNA (cDNA), 463 bp; double-stranded, linear
gaattcggccttcatggcctagtttatatagagtaggtttacatagaaaaggaaagttcactgagatttctaggtacaagatctancaacatgcacaaaccaatattgtttatgtataacagcttcaaacaattagaaattgtaataaccattatgaaagtgatgaaaattgtattgcttagtattctaccaaaattattaagtaatttttttttttttttttnanacggagtcccgcctgggccacaagngcnaaaatttgtttcnaaaaaaaaaaagaaaagaaagaaaaaaaattgaactctcaatccctagatgtaaaatcaacctcgtgttcttgatttcaccagtaattcataaccacaactgttgtgtcttgaacacttactatgcttggcatacttataatttttatttcactttatcctcaaatttaagatgaagtttctcctactaactcgag

SEQ ID NO: 778 - DNA (cDNA), 466 bp; double-stranded, linear
gaattcggccttcatggcctagctgggagttacctgntatcctgatggtgccatgtgctagctgggtgacaataacccagccacctaacatctcaaagattgttcctttttgtgtgaaatagggatagagttgtctacttcccagagccagatagagaacttaagagatgaatctgaaaatacaatagcctaaataaattcaaggaaacactattatcttactggatctttccagcaaccatgttacttttggctggattttgtattttccaatttgtgaatgacacaacaaagagctaggtaggttaagtaaatggtttcagataataagcccagttagcccagacgtttattttccatttgcatagaaaatgaatgttttatgcatacatttgtttgcccagggctaggatattacttgcatatgatgttcttatataattaaaaaaaagaatacaacctcgag

SEQ ID NO: 779 - DNA (cDNA), 519 bp; double-stranded, linear
gaattcggccttcatggcctaattccacagggaaatgggcagactgaaccagtccaggtggtgaattttccaagaacatagtttaagttgattaaaaatgcttttagaatgcaggagcctacttctagctgtattttttgtatgcttaaataaaaataaaaattcataaccaaagagaatcccacattagcttgttagtaatgctctgaccaagccgagatgcccattctcttagtgatggcggcgttagggtttgagagaagggaatttggctcaacttcagttgagagggtgcagtccagacagcttgactgcttttaaatgaccaaagatgacctgtggtaagcaacctgggcatcttaggaagcagtccctggagaaggcatgttcccagaaaggtctctggagggacaaactcactcagtaaaacataatgtatcatgaagaaaactgattctctatgacatgaaatgaaaattttaatgcattgttataattactaatgtacgcagactcgag

SEQ ID NO: 780 - DNA (cDNA), 321 bp; double-stranded, linear
gaattcggccttcatggcctactagacccccgccacagcagcctctgaagttggacagcaaaaccattgcttcactacccatcggtgtccatttatagaataatgtgggaagaaacaaacccgttttatgatttactcattatcgccttttgacagctgtgctgtaacacaagtagatgcctgaacttgaattaatccacacatcagtaatgtattctatctctctttacattttggtctctatactacattattaatgggttttgtgtactgtaaagaatttagctgtatcaaactagtgcatgaatagattctctcgag

SEQ ID NO: 781 - DNA (cDNA), 560 bp; double-stranded, linear
gaattcggccttcatggcctaaatgggaatcatcattgcataacaaacctaaagagaaaatgagaacatttacgaagaagaaacagagttactgtaccaagggcaaaaagaaaagaagggggaaaaaaaataagtccataaaagaaaaacaaaaggaatccatgagcctggacgacaagccgtgggggatgtaagaaggtttggaacccaaaaggcaagtctaatcagctggggtaacatggcgaggcagttccacatgctgagacttgtggctaccacattaaaaaagactgtgcatattctaaatgacagcagtcctgcagtgacgtggatattcactctagaagctatgcaggcaggcgtgggaaaagcgaagagatgttgcaccatgcagctgcaatctttatgtctctactggcacaaccgaaaagagtaatgtggaaattatccagagaatttaggtgagaaaaacagaagccatcagattttctcctttaaatcttcagaggggtatacactcccctggaaaaccaagttgcctctctgctcacatcctcgag

SEQ ID NO: 782 - DNA (cDNA), 633 bp; double-stranded, linear
gaattcggccttcatggcctaggggagtcctcattctgacctcaaagaaaggactgtattgtctggctccataatgcaggggacaccaagagcaacaactgaaagctttgaagatggccttaaatatcccaaacaaattaaaagggaaagtcctcccatacgagcatttgaaggtgccattaccaaaggaaaaccatatgatggcatcaccaccatcaaagaaatggggcgttccattcatgagattccaaggcaagatattttaactcaggaaagtcggaaaactccagaagtggtccagagcacacggccgataattgagggttccatttcccagggcacaccaataaagtttgacaacaactcaggtcaatctgccatcaaacacaatgtcaaatccttaatcacggggcctagcaaactatcccgtggaatgcctccgctggaaattgtgccagagaacataaaagtggtagaacggggaaaatatgaggatgtgaaagcaggcgagaccgtgcgttcccggcacacgtcagtggtaagctctggcccctccgttcttaggtccacactgcatgaagctcccaaagcacaactgagccctgggatttatgatgacaccagtgtctcgag

SEQ ID NO: 783 - DNA (cDNA), 407 bp; double-stranded, linear
aaatgacactgaatgacacgttagccaaaactaacagagaattattagatgtgaagaaaaaatttgaagatataaatcaggaatttgtaaaaataaaagataagaatgaaatattaaaaagaaacctggaaaacactcagaaccaaataaaagctgagtacatcagcctggcagagcacgaggcaaagatgagctcgctaagtcagagcatgagaaaggtgcaggatagtaatgctgaaatcttggccaactacagaaaaggccaagaagagattgtgacactgcatgccgaaattaaagcccagaagaaggagctcgacacaatacaagaatgcattaaggtaaaatatgccccaattgtcagctttgaggagtgcgagagaaaatttaaagcaacagagctcgag

SEQ ID NO: 784 - DNA (cDNA), 342 bp; double-stranded, linear
gcagaaaagtcagaacaatttgaggagcttcaaagcatccttaagaaagggaaactaacttttgagaatattatggaaaaactgcgaatcaagtattccgaaatgtacaccatagtccctgcagagattgaatcccaggtggaagaatgcagaaaagctttagaagacatagatgagaagattagcaatgaagtcttaaaaagctcaccatcatatgcaatgaggagaaaaatagaagaaattaacaatgggcttcataatgttgaaaagatgttgcagcagaaaagcaaaaatattgagaaagctcaagaaattcaaaagaaaatgtgggactcactcgag

SEQ ID NO: 785 - DNA (cDNA), 456 bp; double-stranded, linear
gagataatggatgaaaggattcagaggaaagtagagaaactagagcaacaatgtcagaaagaagccaaggaatttgccaagaaggtacaagagctgcagaaaagcaatcaggttgccttccaacatttccaagaactagatgagcacattagctatgtagcaactaaagtctgtcaccttggagaccagttagagggggtaaacacacccagacaacgggcagtggaggctcagaaattgatgaaatactttaatgagtttctagatggagaattgaaatctgatgttttaacaaattctgaaaagataaaggaagcagcagacatcattcagaagttgcacctaattgcccaagagttaccttttgatagattttcagaagttaaatccaaaattgcaagtaaataccatgatttagaatgccagcngattcaggagtataccagtgctctcgag

SEQ ID NO: 786 - DNA (cDNA), 488 bp; double-stranded, linear
gaattcggccttcatggcctaggggtgagagtgtagacggctttcccagttgtatccaaggcagtcagacagggggatttgggctgtgttgtgccccagcgctgcaaggtggccaacagcgacggcggtcgggggacacctgcagtgagaggctcccctctcagcacactcgtctcgcttccctcaggctttggctgatttggatctggttgctgaacttccaacaattcctcaaaatcatccacaaagaactccttcagtggagggcgctttggcctcttcagggtgttcagaagctgctggattttggaggacactctgctgttcacagggacaccatctgctgtttccagcatgctcccgctgcacccccgaggaacacttctcacagaagccacctgtggacgctcaaagtacgaatgctccacgaggcccgtggtgacatcaggaggggcagaatgcagatctatgtgggtgtgggcctcgag

SEQ ID NO: 787 - DNA (cDNA), 452 bp; double-stranded, linear
gaattcgccttcatggcctaagtgtccggaacatatgtcatgattctatgtccaaacaacaggccaaccctcaggacagaccccgccaccccccttctctgcagctcctggcagggacggtgcacagtggtgccgtgtgcagggggccagcgcagccactgggcatctggggcagcgctggtcgcctggccacctccttgctggggccgctgggcctccggcctagaaggacaggaagccatccacctcaaggcgcaggaaggggtccagcagggcccggagcttccagatggtggcacggctcagcaggggcggcaccagcccctcgaagggcctggggttcaccatgtacacgtaggcgaccagcagggtgcccagcagcagcctcaggatcagcagcctgagaatctccagctggatgtcctccatctggtccctagacctgcctcgag

SEQ ID NO: 788 - DNA (cDNA), 388 bp; double-stranded, linear
gaattcggccttcatggcctacaggacagaggcaaatagtagacaaaggtgaagccaaaggcataattaaggaaggaagaacgatattaccaaaagatgaaactgaaaagaaagtcttaactgtgtcaaattctcaaattgaaactgaaattgaagttccatcgtccgcagttccagaacacagaatgtatgaaaatcaaagtcaggtggttcttgtagaaaaccttcatgttaacaaaacaaatgaaacaatcagacatgaaaataaaccgtatgttcctagttcagcacaaatgacaagaaggaaattccaaaaggctaagccaaatttgggaagagcacacagtaagaaagaggaaccagttttagaaaaagtcacaaactcgag

SEQ ID NO: 789 - DNA (cDNA), 457 bp; double-stranded, linear
gcctgaagacatcaaaaaggaggcagcccgggcttctaggaagatctgctttgtgtgcaagaaaaagggagctgctatcaactgccagaaggatcagtgcctcagaaacttccatctgccttgtggccaagaaaggggttgcctttcacaattttttggagagtacaaatcattttgtgacaaacatcgcccaacacagaacatccaacatgggcatgtgggggaggaaagctgcatcttatgttgtgaagacttatcccaacagagtgttgagaacatccagagcccgtgttgtagtcaagccatctaccaccgcaagtgcatacagaaatatgcccacacatcagcaaagcatttcttcaaatgtccacagtgtaacaatcgaaaagagtttcctcaagaaatgctgagaatgggaattcatattccagacagagatgctgcctgggaactcgag

SEQ ID NO: 790 - DNA (cDNA), 582 bp; double-stranded, linear
gaattcggccttcatggcctagcggcagcggctcttcaaagcggagccgggagtttttgctacagttttcgccaccatgagtcgcagctataatgatgagctgcagttcttggagaagatcaataaaaactgctggaggatcaagaagggcttcgtgcccaacatgcaggttgaaggtgttttctatgtgaatgatgctctggagaaattgatgtttgaggaattaaggaatgcctgtcgaggtggtggtgttggtggcttcctgccagccatgaaacagattggcaatgtggcagccctgcctggaattgttcatcgatctattgggcttcctgatgtccattcaggatatgggtttgctattgggaacatggcagcctttgatatgaatgaccctgaagcagtagtatccccaggtggtgtcgggtttgacatcaactgtggtgtccgcttgctaagaaccaatttagatgaaagtgatgtccagcctgtgaaggagcaacttgcccaagctatgtttgaccacattcctgttggggtggggtcaaaaggtgtcatcccaatgaatgacaaagactcgag

SEQ ID NO: 791 - DNA (cDNA), 468 bp; double-stranded, linear
gaattcggccttcatggcctacattttctgagaaaggtttggatgactgaaatatttcctctacagtcaaggactttggcatgtggtggctgaaactgagcttttttgtgtgggctccagttctcactgttctgcaatgctcatggcaagttgaatggtgagctagcttataaattaaagagctctgaactgtattcagaccgactgggtatctagcttactgttttaacatcattgttgaaaccagaccctgtagtccagtggtgctgccctgttgtgcaaactgctcctttttctcgtgtttttgtaaagagcttccatctgggctggacccagttcttgcacatacaagacaccgctgcagtcagctaggacctttccgccatgtattctattctgtagtaaagcatttccatcaacaatgcctaattgtatctgttatttttggtttaacacacactgctcgag

SEQ ID NO: 792 - DNA (cDNA), 519 bp; double-stranded, linear
gaattcggccttcatggcctacgtggctataactggaaaactggatccgaaatcgaccagtaaactgggtagctcggtctacgccccgcccaccacccttgctagccaatagccttcacaactcttctgccactcccgcccattccagtgctgtgccgctgctttttcttccactcggatctcttgagcgcccttagcccgctgtatacgcgcccctcctcggcttcagtaggcaagagggccatctgcccttccttcctgaaggtagaggggacaacaccagctacgacggggactccagaagtccatctcccgaacagcagcggggcgaaaagaaagaaaaagggtttccgaagactcctactcacacccacgctttcccttaacccggaagtgatttccgcccctcctctccctcttcggttgatactggaggagaaggacggccaggtctggcccggcatgccctgggcttccggtgacctctggcccttttctgtcgtccactctccgctcgag

SEQ ID NO: 793 - DNA (cDNA), 338 bp; double-stranded, linear
gaattcggccaaagaggcctacagaaacatccaattctcaaactgaagctcgcactctcgcctccagcatgaaagtctctgccgcccttctgtgcctgctgctcatagcagccaccttcattccccaagggctcgctcagccagatgcaatcaatgccccagtcacctgctgctataacttcaccaataggaagatctcagtgcagaggctcgcgagctatagaagaatcaccagcagcaagtgtcccaaagaagctgtgatcttcaagaccattgtggccaaggagatctgtgctgaccccaagcagaagtgggttcaggattccatgaacctcgag

SEQ ID NO: 794 - DNA (cDNA), 756 bp; double-stranded, linear
gaattcggccaaagaggcctaccaggatggtctcaatctcctgacctcatgatctgcctgcctcggcctcccaaagtgctgggattacaggcgtgagccaccgcacccggccctaaaccctaggttttgacttctgtaagaaggaaagatttaaacaaacaaacaaacattaaattacaaccataataaacaaaaaaacactaaactaaattacaaccataataaaatctcccaaagtccgtaggcactgacatattacagccttgccaaatcagaatagatttctcatgtgttgtcaatttaccagacacaaagagtagctcagatctcatagactcttcagatcttgtagactaatttcaagtctttttaaagttttgaaaaacatgtgctatttggaattacgtcatcctcgaatattaaacctgagctcaaaaacctattgtttgatattggaaatagttaactccagttttcttctattaagataaaattctttcatcatgtctgtgccctctaaaataatactcctattgctttgtcttccccttctcccctcctagtccttctttagtcattctatttagaatcaagtcgctcatgagtttaagaattagagcagcaagaaattgggctagagatgtacaaaagctttggacaatagtagttttgcttgtcctcattcttattagaagtgctgttaatttactgataaattctaggacggaagacaaatctttgcaactggtactcgag

SEQ ID NO: 795 - DNA (cDNA), 648 bp; double-stranded, linear
gaattcggccaaagaggcctaccaggaagctctcctgcttgtcatgaagtgagaacaatgaaaagtcatagcagatactcagtttaactctgtgtagaacctattagtgtttgagctgttattcagatttgaattcagactgtgtgttgtttgcttatggacactgcctgtcgttctgtcactgttaaattaatgagtctataaggtttttcttccagaggccataggtgacatcactaaaattgcaagataaattgtaatctttgntgntgctgcactccccaacctctcccccaccccccgtggtgtgctgctttctagatgagcgtgttttggagcaggcccatctgggacactctatgctttcaccaaggaagtgcgatctgagcagccacaatccagccaaaagaggatcgtagatatttgctctgatcaactagatgaaaatatagcagaatggatttagcccactgctctgttttatccaactgagtctctgaccagcaattggtgcataattattacagcaaaagttaagaaatgaaactgtagcaattatgtaaatgaatgtgttggcctcttaatacctgttactagtggacttcctgtgaggaagttagttttttgttttgatgaaatgctctcgag

SEQ ID NO: 796 - DNA (cDNA), 610 bp; double-stranded, linear
gaattcggccaaagaggcctaagaggctggccccagtcccaaggaacaagagatggtcaagtcgctagagacatatcaggggacattaggattggggaagacacttgactgctagaatcagaggttggacactatacataagaacaggctcacatgggaggctggaggtgggtacccagctgctgtggaacgggtatggacaggtcataaacctagagtcagtgtcctgttggtcctagcccatttcagcaccctgccacttggagtggacccctcctactcttcttagcgcctaccctcatacctatctccctcctcccatctcctaggggactggcgccaaatggtctctccctgccaattttggtatcttctctggcctctccagtcctgcttactcctctatttttaaagtgccaaacaaatccccttcctctttctcaaagcacagtaatgtggcactgagccctacccagcacctcagtgaagggggcctgcttgctctttattttggtcccggatcctggggtggggcagaaatattttctgggctggggtaggaggaaggttgttgcagccatctactgctgctgtaccctagaagctcgag

SEQ ID NO: 797 - DNA (cDNA), 286 bp; double-stranded, linear
gaattcggccaaagaggcctagccactatcctggttacttgtggattcaccaagcagtccagcaagtcatccgtagaaatgaatgtttgaggagtcgtagtagtatttgaggcaatctgttcctcaattgcattttcactgttgctcattatttgttgtctcttggcacaatgcaattttccaaagtgttctccatccttgtccacaaagtctttcccatcacttccaaatatgcctcctctttctgaaggcggttcttcggacctctgtgctacagggactcgag

SEQ ID NO: 798 - DNA (cDNA), 163 bp; double-stranded, linear
gaattcggccaaagaggcctagttttttattggtttggagactagagccaatagtataatgttctcaaaggaaacagacttgagttgttggattagaggaactaacccaacttatatgattttttttttgtttttgtcgtgtagttatggcactagtctcgag

SEQ ID NO: 799 - DNA (cDNA), 443 bp; double-stranded, linear
gaattcggccttcatggcctagagggaatgcggagaggggtggagaaattccatctttgttagggcagcagtcaaggatgagtgagttagcctcttaaggaagaggctaagctgttagaataaagaggtttacaacatcagcggcttaaatcaaatagaagtgtgtttctctttcacatgacagagtagatgtggcctggcatctagaaagcatatttgtctctgctccactgtgtcttccagggacccattcttctcttgtcttcatgctccatcacttcctagggtgttgtctacacctgcatagccatagctaattttccattctcagcaccaaccaggggaagaggaggaaaggtagcctccttttcatgataggtgtgaagttatgcaggacactctcagggtgaatggaccacagtgtggctcctcctgggctcgag

SEQ ID NO: 800 - DNA (cDNA), 305 bp; double-stranded, linear
gcatgtgcagcggcaaagagaacccggacagtgatgctgacttggatgtggatggggatgacactctggagtatgggaagccacaatacacagaggctgatgtcatcccctgcacaggcgaggagcctggtgaagccaaggagagagaggcacttcggggcgcagtcctaaatggcggccctcccagcacgcgcatcacacctgagttctctaaatgggccagtgatgagatgccatccaccagcaatggtgaaagcagcaagcaggaggccatgcagaagacctgcaagaacggtcgactcgag

SEQ ID NO: 801 - DNA (cDNA), 464 bp; double-stranded, linear
gaattcggccaaagaggcctaaacactcaaattttacattttgagcagtatttacgcctgaattaattcacaagtttcaaggtcactaactttggttatattatattattattttccaatttagccacctctttatttgtataatagagcatacagcagcacataaaacgcaaaactctaggacataaaaagtggcattcggacgatgttgctctgaaatttatgcattaattaaaccggtatatatgtatgcattaattaaaccaatatttatgaagttcctactgtgttacagacgtggatccaggcactgaggatgcagcaggccatccaaatataaagttacttccttaggaagcttccattctaatgggagagtgttgttaaagagatatataataatatgtaaaatgaatccataatggtgagtattatgaagaataaaattgccaggttttctcgag

SEQ ID NO: 802 - DNA (cDNA), 650 bp; double-stranded, linear
gaattcggccaaagaggcctaatcttctgcctgttctgaaaaagctttgcttcttgtgatttgtatcacgagggggaaaggtccttactgtttttccagacctacagttgtgatagaggctcctcccagccccgcccacagaccccaacagtgccctctctcacaaatggattctggggcttggtctttatttttgtttttgttgggggcagcatatggaacccaaaaatagtatcatagcctaaatttggagctttgtgccagccttgtctgtaggatgacccgtgtgggtctcacctggtgactgggagtccacaggggtcagttagtagcagggagctgcagggcgcctgtcagcagagaccgtctcattccccaaacccaggagccagaggaactgacgcccggataaatgcccaagccgccccgggtgggattagtcgtctaccttcccagaaatacaccctcccatcctgtgacttggatacagtttactgatgaaattagggaacctcctgcgccttaccaagaagctgtggctggaacttagtcaatgaaaaatgatttgtaaactctttggagctggctttgaaagaatgtttaaaatgatagctgatactgccagacaacagaacaggccggccctcgag

SEQ ID NO: 803 - DNA (cDNA), 101 bp; double-stranded, linear
gaattcggccaaagaggcctaagagaacaggagcattacagtaaaattcctaagtagccaactgatttgcagtgccagaaatgaataccgatccactcgag

SEQ ID NO: 804 - DNA (cDNA), 723 bp; double-stranded, linear
gaattcggccaaagaggcctagctctctgtacccaaggaaagtgcagctgagactcagacaagattacaatgaaccaactcagcttcctgctgtttctcatagcgaccaccagaggatggagtacagatgaggctaatacttacttcaaggaatggacctgttcttcgtctccatctctgcccagaagctgcaaggaaatcaaagacgaatgtcctagtgcatttgatggcctgtattttctccgcactgagaatggtgttatctaccagaccttctgtgacatgacctctgggggtggcggctggaccctggtggccagcgtgcatgagaatgacatgcgtgggaagtgcacggtgggcgatcgctggtccagtcagcagggcagcaaagcagactacccagagggggacggcaactgggccaactacaacacctttggatctgcagaggcggccacgagcgatgactacaagaaccctggctactacgacatccaggccaaggacctgggcatctggcacgtgcccaataagtcccccatgcagcactggagaaacagctccctgctgaggtaccgcacggacactggcttcctccagacactgggacataatctgtttggcatctaccagaaatatccagtgaaatatggagaaggaaagtgttggactgacaacggcccggtgatccctgtggtctatgattttggcgacatcctcgag

SEQ ID NO: 805 - DNA (cDNA), 406 bp; double-stranded, linear
gaattcggccttcatggcctacggccaaagaggaggagatggcgccagtcagggagcggccgtggcccagacagtgaggaagcgcgaaggcggagcaaccgaggaatcctccggagaagaatcagagccgtcgctaccgccactaccgccaccaccatggaaggagcaaagccgacattgcagctcgtgtaccaggcagtgcaggcgcttaccacgacccagatcccagcggaaaggagcgcgcctctttttggcttggggagctgcagcgttcggttcatgcatgggagatctcagaccagttgttacagatccggcaggatgtggagtcatgctattttgctgcacagaccatgaaaatgaagattcagacctcattttatgagctccccacagtactctcgag

SEQ ID NO: 806 - DNA (cDNA), 329 bp; double-stranded, linear
gaattcggccttcatggcctacgcccgggttggaagtgtgcagtcaatgagctcccgctcctcctggatccgtctgtaggtctccccggtgtgcatgagcagctcactcactggcttctttaggtgttcgctgagggcttcctgctgcttcttccgcagggctgtgttacgctgccagtttttcagaaagttgtgctgaggaggtggggcccagggaggtctcttctcttcttttggggctttttgctttgactctccttcagcagagatgagggtcatcagacagggtgaggtaggtatccgctcagccagctgggtgttccctcgag

SEQ ID NO: 807 - DNA (cDNA), 225 bp; double-stranded, linear
gaattcggccttcatggcctaaggtactttaatcagtctaaatacttgaacatttttatttcagtggtaaaaaatagactgaggcagagtgaagttataaattagaatctaaaaatttacccttcaacattaatattttttagtgctctaatataaaacacagaaaacctatctcaaatataaaagatgaatataaaattattaattaaacaactggcgctcgag

SEQ ID NO: 808 - DNA (cDNA), 275 bp; double-stranded, linear
gaattcggccttcatggcctaacttgctcttctgtttctagttttataaagtgaaagctgcaatcattgattagagacagttctacgctaaagtcataatgacattttatgtaatttcttttttcttttttttgagacagagtctcgctctgttgctcaggctggagtgcagtggagtgatctcagctcactgcaacctctgcctcccaggttcaagcgattctcctgcctcagcctcccgagtagctgggattacaggcccccaccaactcgag

SEQ ID NO: 809 - DNA (cDNA), 253 bp; double-stranded, linear
gcgattgaattctagttgcctacctaccaaactacctactgaactttttaatttgaagatattcttcctggactacttgtttatagtttattaaatgaactgctctatttctaaaaactttatttttaaagtcctttcccgtttagaatgcggcatactcttgcttgtggggtatatatctctgatcgtgataactacctaccgaaaacctttcatggctccttgccaactacaaaattgcgatatcctcgag

SEQ ID NO: 810 - DNA (cDNA), 283 bp; double-stranded, linear
gaattcggccttcatggcctagattgaattctagacctgccgacgcggggagagacaaaaaagagaaagtctttgaaaagcacaaggagaagaaggataaagagtccacagaaaagtacaaggacaggaaggacagagcctcagtggactccacgcaagataagaaaaataaacagaagctccccgagaaggctgaaaagaagcacgctgccgaagacaaggctaaaagcaaacacaaagagaagtcggacaaagaacattccaaggagaggaagtcctcgag

SEQ ID NO: 811 - DNA (cDNA), 316 bp; double-stranded, linear
gaattcggccaaagaggcctaggcttccacccaggaaatgatccagagcctcttttatgttatgttttttgtttgttcctttcaagacaatcgatcaagccagaggcattccccacccttcagcaagacacttcccagtaagcccagctggccttcagagaaagcaaggctcacctccaccctgccggccctgactgctttgcagaaacctcaagtcccacccaaacccaaaggcctccttgaggatgaggctgattatgtggtccccgtggaagataatgatgaaaactatattcatcccacagaaaagctcgag

SEQ ID NO: 812 - DNA (cDNA), 256 bp; double-stranded, linear
gggatgcatagatttagttctgcctcacaggcaggtagcctgagctcctagggggaactgtttttgctaagtagggaatgaaaagcatgtttatttaagcacaaaattaaatctctcctatttttatatgatttcccgttgttttcttccctgtagggaaatctgctgtgatagagaactgcgtaacaggccttttctgtgagcgctcactcatacattatgcacgacgtggctaagatctttgatggcactcgag

SEQ ID NO: 813 - DNA (cDNA), 317 bp; double-stranded, linear
gcaagcggcgcatgcaggaggagaagcagaagtctgtcaacgtcaagaagaccatcctggagatgcgctacggggctgatgtggatgccggctccattgtgcacgccgcccagaagctgggcgagcctcccgtgctgcccgtatctcgcatggcctccatcccctccatgatcggggagaagctgcccaccgccaaggggttggaggccgggctggacacacccaaggtagccaccaaaggcaactatatcgaggtgcgcacaggcgccggcggggacggtctggctcggcccgaggatgacctcccggacctcgag

SEQ ID NO: 814 - DNA (cDNA), 370 bp; double-stranded, linear
gaattcggccttcatggcctacgaactcctgacctcaagtgatcggcctgcctcagcctcctaaagtgctgggatagccactgtgcccagcctagcccttcttcaaatgtttggtaaaattcagcattgaagccatcaggtcttgggctttttgctgggagattttttattatggcatcaatctcattacttgttactggcctgtttaggttttcagttttttcatggttcaatcttggtaggttgtttgtgtctaggaatgtatctgtttcttctaggttttccagtttcttggcgtatagttactcatagtagccactaattatcctttggatttctgcggtattggttgtagtgtccccatctcgag

SEQ ID NO: 815 - DNA (cDNA), 382 bp; double-stranded, linear
gaattcggccttcatggcctaattgaattctagacctgcctcaagcctatcttttagtcttcctagaagcaccgtgttctgtggaactcagcatcagcagctttgctgaggactcccccatcttcctttccttccccggaaagcacagacctaagtgagtcttcactggatcccagctaacagcttctgcccattcctatctttccacagagccagtggcagccccagctgcagcagctacgtgacatgggcatccaggacgatgagctgagcctgcgggccctgcaggccaccggtggggacatccaagcagccctggagctcatctttgctggaggagccccatgaactccctgcttcccctgaacccccagcactcgag

SEQ ID NO: 816 - DNA (cDNA), 274 bp; double-stranded, linear
gccacggtgctcattcagactacccgtgtgcccaagcaggtggcagtacccgcgacagacaccactgacaagatgcagaccagcctggatgaagtcatgaagaccaccaagatcatcattggctgctttgtggcagtgactctgctagctgccgccatgttgattgtcttctataaacttcgtaagcggcaccagcagcggagtacagtcacagccgcccggactgttgagataatccaggtggacgaagacatcccagctgcaacatctcgag

SEQ ID NO: 817 - DNA (cDNA), 356 bp; double-stranded, linear
gaattcggccttcatggcctacaaaaatacacctgtggtcccagctgctcgggaggctganttacgagagtcccttgaacctgggaggcggaggttgcagtgagctgaaatcatgccactgcactccagcctgggcaacagagcgagactctgttnaaaaaaaaaaaaatagcgagagatcgagagagagtgcacgtgagaagactagtagttgctatggactgggggagaaggaacgggttacagggtttcttttggggataacgaaaatgttctaaaactggactgtggtgataactgcacaactctgtgaatgtactaaaaactactgaactggccgggcgcggcagctcgag

SEQ ID NO: 818 - DNA (cDNA), 184 bp; double-stranded, linear
gaattcggccttcatggcctaggcagggtgtcaacttatttaattctaaaaatagtatattcatagagatactatcatcctcatttcatatattcaaaaaattcaaagaagttaagtaaattgccaaaagtcacccagataataagtagaaaagatggtaatgaaatccaggttggccttcgag

SEQ ID NO: 819 - DNA (cDNA), 349 bp; double-stranded, linear
gaattcggccttcatggcctacaacaacaacaacaaaaaaacatcatccggggaagcttttcaatatcctgacgttgggtctctccagtgtagatggaaatatggaattgggaatagacatcgatatttttggaggtccccaggggttaccaatgtgcagacaggtttgggaaccactgcattaggcattttacatttatttagggctttcactggatttgtcaccccatactttcataatccattttttctgattttttttctggtttttggtgagggtatagttgggatggggtttttttttttgtcctcccaccgctcgcccccatccagtgtggacgtactcgag

SEQ ID NO: 820 - DNA (cDNA), 167 bp; double-stranded, linear
gaattcggccttcatggcctactctttccttgaagaatttgttgaagacttcagaagtgatgctggctgctttcttcattaggttgagctccccatcctcctttacagcgatggtatatgccacaactgcactgatatctattttgtcaaagccttcaggtctcgag

SEQ ID NO: 821 - DNA (cDNA), 733 bp; double-stranded, linear
gaattcggccaaagaggcctagcgaaataaaacaagggagtcagcaaaaccagaaatttcagcaatgtcagctcatgacaaggctgcattatcagaagaggaactggagaggaagtcgaaatctatcattgatgaatttctacacattaatgattttaaggaagccatgcagtgtgtggaagagctgaatgcccagggcctactacatgtttttgtgagagtgggagtggagtccaccctggaaaggagccagatcaccagggatcacatgggccaactactctatcagctggtacagtcagaaaaactcagcaaacaggactttttcaaaggtttttcagaaactttggaattggcagatgacatggccattgatattccccatatttggttgtaccttgctgaactggtgacccccatgttaaaagaaggtggaatctccatgagagaacttaccatagaatttagcaaacctttacttcctgttggaagagctggggtcttgctatctgaaatattgcacctactatgcaaacaaatgagccataagaaagtgggagccttatggagggaggctgacctcagctggaaggactttttaccagaaggagaagatgtacataattttcttttggagcagaagttggacttcatagagtctgacagtccctgttcctctgaagcactttcaaagaaagaactgtctgccgaagagctgtataagcgactcgag

SEQ ID NO: 822 - DNA (cDNA), 512 bp; double-stranded, linear
tgccagatagttctgcagaagaaatcactgtttgtcctgagacacaggtaagttcctctgaaacttttgaccttgaaagagaagtctctccaggtagcagagatatcttggatggagtcagaataataatggcagataaggaggttggtaacaaggaagatgctgagaaggaagtagctatttctaccttctcatccagtaaccaggtatcctgcccgctatgtgaccaatgctttccacccacaaagattgaacgacatgccatgtactgcaatggtctgatggaggaagatacagtattgactcggagacaaaaagaggccaagaccaagagtgacagtgggacagctgcccagacttctctagacattgacaagaatgagaagtgttacctctgtaaatccctggtcccatttagagagtatcagtgtcatgtggactcctgtctccagcttgcaaaggctgaccaaggagatggacctgaagggagtggaagagcacgttcgctcgag

SEQ ID NO: 823 - DNA (cDNA), 423 bp; double-stranded, linear
gaattcgggccttcatggcctactctcatctgtatctgtttcctctaactttactgaaaagatagaattcattaagcatgaattctaccatcttctccctactacagctctgtcaaaaagatgttgctctctgagcccaactctccctcagtccccaggattctgtccctgtccacctttaatcttttcctttcctgattttatgttataagttatttagatttcgatgagagataatcgtacctagagtatgggagaactatttaaggtttacaggttgggtggaacccttgtatatactagatggtactgtgagggcttgccacactgtcagccttcatctgaacagagcagaaagtgtttctgcatgttcaccaagccctgctggactgtatcacttttctctgtgggccaaaactcgag

SEQ ID NO: 824 - DNA (cDNA), 353 bp; double-stranded, linear
gaattcggccttcatggcctagcggcctcagatgaatgcggctgttaagacctgcaataatccagaatggctactctgatctatgttgataaggaaaatggagaaccaggcacccgtgtggttgctaaggatgggctgaagctggggtctggaccttcaatcaaagccttagatgggagatctcaagtttcaacaccacgttttggcaaaacgttcgatgccccaccagccttacctaaagctactagaaaggctttgggaactgtcaacagagctacagaaaagtctgtaaagaccaagggacccctcaaacaaaaacagccaagcttttctgccaaaaagatgatctcgag

SEQ ID NO: 825 - DNA (cDNA), 506 bp; double-stranded, linear
gaattcggccaaagaggcctaggagtaaggatgcagaaatgattgcagcatatttcattctctacgcaaggatgttcctcggaaatggaggcgacattgctgcctgcttttttgagggaattgatgatgttcactggaaggaaaatgggacattagttcaagtagcaactatatcaggaaacatgttcaaccaaatggcaaagtgggtgaaacaggacaatgaaacaggaatttattatgagacatggaatgtaaaagccagcccagaaaagggggcagagacatggtttgattcctacgactgttccaaatttgtgttaaggacctttaacaagttggctgaatttggagcagagttcaagaacatagaaaccaactatacaagaatatttctttacagtggagaacctacttatctgggaaatgaaacatctgtttttgggccaacaggaaacaagactcttggtttagccataaaaagattttattaccccttcaacctcgag

SEQ ID NO: 826 - DNA (cDNA), 337 bp; double-stranded, linear
gatggagcagttccagaaggagaaggaggaactggacaggggctgccgcgagtgcaagcgcaaggtggccgagtgccagaggaaactgaaggagctggaggtggccgagggcggcaaggcagagctggagcgcctgcaggccgaggcacagcagctgcgcaaggaggagcggagctgggagcagaagctggaggagatgcgcaagaaggagaagagcatgccctggaacgtggacacgctcagcaaagacggcttcagcaagagcatggtaaataccaagcccgagaagacggaggaggactcagaggaggtgagggagcagaaacacaagctcgag

SEQ ID NO: 827 - DNA (cDNA), 216 bp; double-stranded, linear
gaattcggccaaagaggcctacaggtacagaatcatatgaatgtttctttctttctttcttttctttccttctttccttctttctttctttctttttttgagacagagtcttgttctgttgccagactggagtgcagtgactcaatctcagctcactgcaacctccacctcccaggttcaagcaattgtcctccctcagcgaggacctgcctcgag

SEQ ID NO: 828 - DNA (cDNA), 386 bp; double-stranded, linear
gaattcggccaaagaggcctaaaaaaaagaagatgggttttttaagtccaatatatgttattttcttcttttttggagtcaaagtacattgccaatatgaaacttatcagtgggatgaagactatgaccaagagccagatgatgattaccaaacaggattcccatttcgtcaaaatgtagactacggagttccttttcatcagtatactttaggctgtgtcagtgaatgcttctgtccaactaactttccatcatcaatgtactgtgataatcgcaaactcaagactatcccaaatattccgatgcacattcagcaactctaccttcagttcaatgaaattgaggctgtgactgcaaattcattcatcaatgcaactcatctcgag

SEQ ID NO: 829 - DNA (cDNA), 293 bp; double-stranded, linear
gaattcggccaaagaggcctagctgaatcctagatttcagcttctcactcagaatttaagctgttttcagtaccagaaatatttaagactgttagtttaacttctaagaatagcagataaagcgtataggtgttttgagataaccgtattcataggaaaaacaaacataaaactttcataattttgggaagagttacacacaaaaatatcatcattgaataattagtacaacaaaaatgcatttgtttgtcctaaaggttgaaatgaacagaatcatgatgggaatactcgag

SEQ ID NO: 830 - DNA (cDNA), 146 bp; double-stranded, linear
gaattcggccaaagaggcctaattgaattctagacctgcctatgtcctattccctgtgtcctgcaagaccccctttggtttggttttcttttcttttctttttttcttttttgagactgcgtcttgctctgtctcccaggctcgag

SEQ ID NO: 831 - DNA (cDNA), 158 bp; double-stranded, linear
gcgattgaattctagacctgcctctcatccactattgtctttccccaatttttttctagccttatcttccagaattcctctcagacataggtggccctggttgcttgatcctgtctctaagttggtctttcatgttttctctcctcagattgctcgag

SEQ ID NO: 832 - DNA (cDNA), 317 bp; double-stranded, linear
gaattcggccttcatggcctagctgatttaaatctaaaaactggataagaagctgtggcttgtaattaaaaatagacctttattcactagacctacagtttgcttttttcatatgttaagaaaagtttaatatcctgcttctctatttcagttctaggggcaccactatcagttaaccctaaagatttctgtgggtgaaaccattttgattaccatcttgctctgctgccagttatggtaaccaaactctctttgtttctggatgctaaatctgtccacttgtgccttaactacatcctaactcccgtcaactcgag

SEQ ID NO: 833 - DNA (cDNA), 339 bp; double-stranded, linear
gaattcggccttcatggcctagcccccggagcccaccacagtccccagagtgtgataaaaacaatttttatacttcttatctctttctagtagtctacatcccattcccagtctttccaatcataaaaatttgtagtttatttagttcacacttgaacgtcctatgaaactgttttaaaccttttacctatcttgtttcttgtcattattcttaagccattgatacagaaatcagaaccaaatttaatattgttgtgggtatgagacagtttctgtcatgttttaattttttccttaaagttttactatgtacttcatatataccgggcacttctcgag

SEQ ID NO: 834 - DNA (cDNA), 396 bp; double-stranded, linear
gaattcggcctcatggcctatgacttttaagtttcttattacactgagaaacacctaactatcctaatagaattaaatttccctaagttataagacacttgaattttttaaaaagagataattaaatttctcctatattttatttcatttattttttcagtcatgctccttctgtatctcctatattttattatattacttacatggctttatttttacaataactctttttttcccttcttttatttatttgtttatttttggaaacagagtttccttatgctgcccacgctggtcctgagctcaagcaatcttcacgcctcagcctcccaaaattataggactacaggcatgagccactgtgcctggcctaagccactgcacccggcgctcgag

SEQ ID NO: 835 - DNA (cDNA), 294 bp; double-stranded, linear
gaattcggccttcatggcctacttttactcatgcataattttgtaaaatcctacattggtcatttggaaaatattgattcactgagtaatacaactcttccaaatgttgaatgtttcattctacaatatcagaaactcaatttgttaatgttactactagtctcatcagaaatgtctttaagtatttgttaactggcaaactcatagtgacgactacaggctttccagaattttcattttcatttgaagtctgaattttatcaactataaatactgtcagttgtttccctcgag

SEQ ID NO: 836 - DNA (cDNA), 352 bp; double-stranded, linear
gaattcggccttcatggcctactctgatactaactgtagtctacatttatacattgtgtctgaatgctggttttgtggcttcactagctccctttttctctctccttttttatcctgtcttttgctgctgctttccaccttctgtccagctccatcttcagacagctccctgtataacgctccacttcctgagtattccagttgccagcctccttcagcacctcctccatcatacgctaaagtcatctcagctccagtgtcagatgccactcctgattatgctgtagtgactgctttgccacctacttccacaccccctacaccaccactgcgacacccagcgacactcgag

SEQ ID NO: 837 - DNA (cDNA), 355 bp; double-stranded, linear
gaattcggccttcatggcctaccggaccttgaaaatggaatgttcagaaacacatgtgcaagggagctgtgccaagctcatgttgcgaacaggcctcctgatgaagcttctcagcgagcagcaggaagcaaaggcattgaatgtagaatgggatacggaccaacaaaaaacaaattatattaatgagaacatggaacagaatgaacagaaagagcagaagtcaagtgagctcatgaaagaagttccaggagatgactataagaacaaactcatcttcgcaatatctgtgactgtaatactaataattttgattataattttttgtcttatagaggtgaattcacatatgctcgag

SEQ ID NO: 838 - DNA (cDNA), 540 bp; double-stranded, linear
gaattcggccttcatggcctaaaaaatctagttgagaaaaagaaagaaaccaagaaggctaatcacaagggttctgaaaataaaactgatttagataattctataggaattaaaaaaatgaaaacctcatgtaaatttaagatagattcaaacataagtccgaagaaggatagcaaagaatttacacaaaaaaataagaaagagaaaaaaaacattgttcaacatactacagactcttctctcgaagaaaaacaaaggacattagactcaggcacctctgaaattgtgaaatctcccagaatcgagtgttctaagacaagaagagaaatgcaatcagtggttcaactcataatgacaagagacagtgatggttatgaaaactcaacagatggtgaaatgtgtgacaaagatgctctggaggaagattcagaaagcgttagtgaaataggaagtgatgaggaatctgaaaatgaaattacaagtgttggtagagcttcaggtgatgacgatggaagtgaagatgatgaagagaagctcgag

SEQ ID NO: 839 - DNA (cDNA), 539 bp; double-stranded, linear
gaattcggccttcatggcctagcatttcatctctaaattggggagaatagaagcatctacttcatgtagtagccaggattagaagagggaggaataactgggccctggatagaatgtgatgaatgtatattcttaatgagaagtggaaataatttgtggttgagagctgtgcctcagatcagagtgacaggatacatggctaggctatattttccagcagattaagagctgcagcccaagactctgaaatatgaagaaaaaaggagaagatgacagcatatctttttaaagaaatattttccagccaaatggtgcagcagaggacttccaggaatttgttcttgttctgtatcaaaggtgaagagttcgtagccttcaaggaaacaagaaaccatgggatggagtgaaggaaggtggcctggaaccagctgctgagcctctctgagccccagtttcctcgtctctaaaatggggctgatctcctctccctcagactgttgttgcaggaattaaaacaggtgttgagtgggctgctcgag

SEQ ID NO: 840 - DNA (cDNA), 297 bp; double-stranded, linear
ttccacagctctgatattcagtaacccatgtggagaacaaaaggattttgctccatgaagtctaattgcctgctgaataaataaataaatagatgaagcactgcatgcattaaatgaaagtaaatattgaccctgccaccatatgtttgctggggtgctggctgaagtgtgctggcaggtccaatcagtcagagtctgccagcccagcaagcaggagagacaggaatatcaaaaaggcgctcctgcttgtgccttaatctttgtccaacccccaattcctccaccacaggcctcgag

SEQ ID NO: 841 - DNA (cDNA), 366 bp; double-stranded, linear
gaattcggccttcatggcctaccttattagtgattggcgattcaggccatgtcatagggcctttcagacaaaaggttcttatcccagtcagctggccaaaacattaactttggatttcttaccctgctacagcatcttctagaaaggcagcaagataatattgtggcagtgcacagataacatcagggtagacttgactggagaaaaccaaattctgcgcttgctcctgtgtgcccccatccagctgtgcatgcacacacaggacacctttctagtatgaagaacttgcatcatgtctgccctctattgagcacccccttctagaaatacttccaagtattagcatgtgaactgttgactctcgag

SEQ ID NO: 842 - DNA (cDNA), 190 bp; double-stranded, linear
gcgattgaattctagacctgcctcgagctgacttatgaattctttctgtgtgatcgtaaaagtgcagagtttattgcaaagagaatcttcatctgaatcctcagcctgggaatcttcctcttccaccgccaactcctccacccagtctgagtctacttcaatggcccgctcttccccatccgcactcgag

SEQ ID NO: 843 - DNA (cDNA), 627 bp; double-stranded, linear
gaattcgggcttcatggcctaagctccgcgagccccctacaactcgtttccttccgttcaccttcgcagggcggcgactggcggcgcgatggacctgaccgggctcctgctggacgaagaaggcaccttctccctcgccggcttccaggacttcacgttcctcccaggacaccagaagctgagtgcccggatccgaaggaggctctactatggctgggattgggaagccgactgtagcctggaggagctctccagcccggtggcagacattgctgtcgaactgctccagaaggcagcccccagccctattcgccgactccagaagaaatacgtagctcatgtgtcccgggaggcatgcatctccccatgtgctatgatgctggctctggtgtacattgaacggctccggcaccgaaacccagactacttgcagcatgtgtcatcctctgacttgttcctgatctccatgatggtggccagtaagtacctctatgatgaaggggaggaggaggaggtcttcaacgacgaatggggagctgctgggggtgtggccgtgcccactctcaatgccttggagaggggcttcctgagtgccatggattggcatctctacactgaacgctcgag

SEQ ID NO: 844 - DNA (cDNA), 305 bp; double-stranded, linear
gaattcggccttcatggcctacctgagctgccgaagccgccgtcctgctctcccgcgtgggcttctctaattccattgttttttttagattctctcgggcctagccgtccttggaacccgatattcgggctgggcggttccgcggcctgggcctaggggcttaacagtagcaacagaagcggcggcggcggcagcagcagcagcagcaatctcttcccgaacacgagcaccacaggcgcccgaaggccggaacaggcgtttagagaaaatggcagacgatattgatattgaagctctagctcgag

SEQ ID NO: 845 - DNA (cDNA), 409 bp; double-stranded, linear
gaattcggccttcatggcctaccagaaaaaacttacattgaagagaggattccttgttttgactatgtgtgtttctgccgtcttaggcagccaacgtattggtttacatggatctggaggattatgcacactagtgttgagtttcattgcagggacaaaatggtcccaagaaaagatgaaagtccaaaagattattacgactgtatgggatatttttcaaccacttctttttggtttagttggagcagaagtatctgtttcatcgcttgaatcaaatattgttggcatatctgttgccactctaagtttggcattatgtgttcgaattttaaccacatatctattgatgtgctttgctggttttagttttaaggagaaaatatttattgctttagcatgcatgctcgag

SEQ ID NO: 846 - DNA (cDNA), 370 bp; double-stranded, linear
gaattcggccttcatggcctaggcacggtacatacgattattataaacatcagctgcggttctgggagtgagcttgtgtcgtgttagtgccatctccctgacaaatctgacctgtacccacatctcaggctgggaaggagtagctgggcctccctttaatgcagcggcactggtttgggtcacaagagctggtttgatcaacccctgactccccctggcgggaggtgctcgtcacatctgggagcctgagcagaggtgccgggggcttggaagctggagaaatgatggatctttctccaggagaaacaattcttatcttcacatcngccccgtgctccaaatgaagagcgcgtttgcatagctgctcgag

SEQ ID NO: 847 - DNA (cDNA), 504 bp; double-stranded, linear
gaattcggccttcatggcctacgcgcggccgagcggaggcggagtcggcgccgagaacatggctggaggcaaagctggaaaggacagtgggaaggccaaggctaaggcagtatctcgctcacagagagctgggctacagtttcctgtgggccgcatccacagacacttgaagactcgcaccacaagccatggaagggtgggtgccactgctgccgtgtacagtgctgcgattctggagtacctcactgcagaggtgctggagctggcaggtaatgcttctaaggatctcaaagtaaagcgtatcactccgcgtcacttgcagcttgcaatccgtggtgatgaagagttggattctcttatcaaggctaccatagctgggggtggtgtgatccctcacatccacaaatctctgattggaaagaagggacagcagaaaactgcttagagggatgctttaaccaacctcttccttccccgtcattgtactgtaactgggacctcgag

SEQ ID NO: 848 - DNA (cDNA), 436 bp; double-stranded, linear
gaattcggccttcatggcctaaacaagcagagggactccccagatagcttcatacccagtttagctttataacaagtgtagttttaggctctgtcttggcatacttgagagcacaatggctgcttcaaaacaggcatttgaactcgctgtttaatcaaattcttctttaatctaaagtgagtttctcatagagagcatatacacttaacccttgaacaatgtaggggttggggtggggagtcaaccccctgtgaagtaaaaatttgctaataacttttgactcccccagaacttaactataaatagcctactattgattggaagtgttaccaacagcatacacagttaacatatattttgtatgtaatatgtgttatccactatattcttacaataaagttagcaaaagaaaaaaatgttattaggaatcctcgag

SEQ ID NO: 849 - DNA (cDNA), 502 bp; double-stranded, linear
gaattcggccttcatggcctacatgagcccaggagttgaaggctatagcctgggtgacacaacaaggccccatctctaaaaaatatataaataaataaagttaaggatgctgcgtggtttatatgttcagaaagagattgaggtaataaaagagtttttggccaggctctggcttacacctcggcctcccagagtgctgggattacaggcatgagccaccgcgcccagccggaagtaggttttttgaagagtcagctgaaaacaactgttgccgtattcggaatttaaaattttaatttgaaaatattataactgagaaattattgtatatatttatggtatacagcgtgatgttatgatacatgtatacaatgcagaatgattaaatcaagctatttaacatagctgtcacctcaaatactatttttgtggtcagaaatttgaaatttattatctcaggaattttgaaatgtacaatacattattattaactgttctcgag

SEQ ID NO: 850 - DNA (cDNA), 291 bp; double-stranded, linear
gaattcggccttcatggcctagataaaaagaaacaaaaaagagaagatatgataagagaacagaagatataccataaatatttggcacagagacgtgaggaagaaaaagctcaggagaaagaatttgacagaatattagaggaagacaaggcaaagaagttggctgagaaggacaaggagctgagacttgaaaaggaggcaaggagacagcttgtggatgaggtcatgtgtacaagaaaacttcaagttcaagaaaagttgcaacgagaagctaaagaacaggaactcgag

SEQ ID NO: 851 - DNA (cDNA), 311 bp; double-stranded, linear
ggttctgtattctgttggttggagtgttctactattgttgggtggagtgttctatcttctgttgggtggagtgttctgctgttgttgggtggcgtgttgtatattctgttgttgggtggcgtgttgtatattctgttgttgggtggcgtgttctatcttctgttgttgggtggatggattgttctgtattctgttgggtggcatgttctatcttctgtttttgggtggagcgttctatcttctgttgggtggcgcattctatattctgttgttgggtggcgtgttctgtattctgttgtgggtggctcgag

SEQ ID NO: 852 - DNA (cDNA), 532 bp; double-stranded, linear
gaattcggcccttcatggcctagtctcatctcagagtactcagagaaactattttttaatctctagatatcaatcaatgaatatttattattaaatacctgctatgtgccagatggtgttaattataagtttgttctctttttgtcgtgctacttaggcttttatcattttgtcctatcattagggaagtggctccnnnncttacagctaatttttttttcaatttactaatgactttttgtggaggtggggatctcttctgttcaacattttctatgattcatctcaatcctccagtgattattaaaaaacagttgcagtaagttcagtcataggggcactggaatgagtccttaaaactttatgctgctgcttttgcaatgatggattgcctgagaattaaggaaagataactactctcttggtcactgtatttccaatcaaccatatcctcccagaatatgatttcttccctcaggcattttagaaaagagacaagagacagattttttttttcaggcaatgactcgag

SEQ ID NO: 853 - DNA (cDNA), 415 bp; double-stranded, linear
gaattcggccttcatggcctactttttgataagcaactagtggtctcattatcagaggtccctgaggggccctacaggcccccccaggttctgcccccaagattctaagagagaccttgtgctagggctctagtcttgatgttctttgcattgtttggatatgaagcccaggatatgtgggcacaataaggtaaatcatgagatgtgaaggagaatgaagatcaggccagaggtcaccattcattgaagagccagagaaaaagaaaattagtgcacagatttgtgtagatttacagagaacttctatttgctgcaagaacttcatcaggcgctgcaccatgcctgatttggaaaggagcttctttggggcctgatagaactgaattaatatgaagaaattgaagtggctctcgag

SEQ ID NO: 854 - DNA (cDNA), 324 bp; double-stranded, linear
gaattcggccttcatggcctagtaaaattagctgaaaaataattttccaatgcaaatactaatgagggttatatgaccgttgtccaaagcatttgcagtgctgcatgacatttgtcctaaaacctgactcttaaaacattccttgtgaaaatagaaatattcccatgcctagattccaaataataaaagacactgagagtgttttcaaaattaatggactgatttaaatttcactggaaagcagctttttaaaactaaattgtctggatgtggcctccctgtgatcacttccaactgcttactgccaacttctggcggctcgag

SEQ ID NO: 855 - DNA (cDNA), 616 bp; double-stranded, linear
gaattcggccttcatggcctaacggccttcagatggaaggagggcaggtgcatatctgttagcaaaatcttcacaatcatcttgagtttctcagcaaagtcggcctggctggaaattcctggcgctgccatgctgaaggtgaccagcaacacagcccccaggatggtcagttgttccagctgcaactggagctcgtggaagcgagactggtccattaaaactgtttcggggaacggcctctggaggtggtcccacttcagaagcttcaggtaagcgtaattctggacagcaacagggctcagcctgggcatgtccccagagccagcagccattccccccactggcagggcgtgtttatacttctgagtcataaggtcctctgaggcttcttccagccactgggtgacaaagtccagggaatttggttgcctctccaaaatctcttgaaacttcttcctttcgtattcaactgactgctgcatgagatgaggcctgatgctactgatagcaaagttggccatgtccactttcattaggtccaacacagaaaaaatttctctgaaaaggggcactatttccttaatgtcctttagtttcttaacttcctcatctcgag

SEQ ID NO: 856 - DNA (cDNA), 497 bp; double-stranded, linear
gctctgggtgaaaagatctcacaccaatgtacataatgtggccatcctttccattttcaagaagttgccttgctttgatactgcaaattcagtatttgtacactggaatgataaaaagatgttccactttcttttcagccagaaagcttcctcgttgtgtgtgtgcgtgtgtgtcccatcctattgcctgttctttctaaatctacattttgttaccttatccaatacttgctttagcaagaacattatggggcccaccatattccacagggccatgccaacctttggaaaaaaggtaggtcaaggaagaaatcagaacaaaccctgtgaccattccacctccttgcatcttgggcttgggtttggaaactgaccagcaagctggagctgccaccacagagaaacatcaaagcaaaagggttccaggaccagagattaggtaactagctacaggccagaggaatgcttccctctctagatcaacaagcaccctcgag

SEQ ID NO: 857 - DNA (cDNA), 262 bp; double-stranded, linear
gttcatggcctagatgctggtttgtttttgttttcgtttttttgagacagtcttgctctgtgacccgggctggagtgcagtggtgcgatctcgctcattgcaacctctgcctcccaagttccagcaagtctcctgcctcagccccccaccgagtagctgggactacacgcaagtgccaccacgcccagctactttttgtatttttagtagagatggggtttcaccatgttggccaggctggactcgaattcctgacctcgag

SEQ ID NO: 858 - DNA (cDNA), 441 bp; double-stranded, linear
gaaactataatcatcagtactgtaatgagcaattatgaggcctacaagccttccacaggagctatgggagatcgactaacggcaatgaaagcagctttccagtcacagtacaagagtcactttgttgcagccagtttaagtaatcagaaggctggaagttctgctgctggggcaagtgggtggactagtgcagggagcttgaattctgttccaactaactcagcacaacagggccataacagtcctgacagccccgtcaccagtgccgccaagggcatcccaggctttggcaatactggcaacatcagtggtgcccctgtgacctacccgtctgccggagcccaaggagtcaacaacacagcttcagggaataacagccgagaagggactgggggcagcaacgggaaaagagagagatatactgagaaccgggaactcgag

SEQ ID NO: 859 - DNA (cDNA), 384 bp; double-stranded, linear
gaattcggccttcatggcctactggtcgccaatgtgctgcaggtcatggctccggaatcaaattgggctcaaacggggcaagctccaacacagtggagcctggcgctactcccacctccaccttgcggatctcagagctgcaggatggctctgcccaccgcaccctgagctggccccgcttggggctggcattgggggacagtgtgttctgggcgtctctgctcctctctgctggtgcctgtgcctctgctggccgcccactcatagatgtcagagccacaggacggccccgcagaatccctgcgccgaccctgccgggggctggctttggtgcacatgcaactcgtcatcgtggtccccatgggcacctctgctcttctcgag

SEQ ID NO: 860 - DNA (cDNA), 421 bp; double-stranded, linear
gaattcggccttcatgcctacgtttcccgagaaaccaagccacaaaaagtacagggccgccctgaagaaggagaaacgaaagaaacgtcggcaggaacttgctcgactgagagactcaggactctcacagaaggaggaagaggaggacacttttattgaagaacaacaactagaagaagagaagctattggaaagagagaggcaaagattacatgaggagtggttgctaagagagcagaaggcacaagaagaattcagaataaagaaggaaaaggaagaggcggctaaaaaaacggcaagaagaacaagagagaaagttaaaggaacaatgggaagaacagcagaggaaagagagagaagaggaggagcagaaacgacaggagaagaaagaaaaagaggaagctttgcagaagggctcgag

SEQ ID NO: 861 - DNA (cDNA), 271 bp; double-stranded, linear
ggatttctttggaatgggcaaagaagtggggaatctgctactggaaaactcacagcttctggaaaccaaaaacgccttgaatgtggtgaagaatgacctgattgccaaggtcgaccagctgtccggggagcaggaggtgctgaggggcgagttggaggctgctaagcaggccaaagtcaagctggaaaaccgtatcaaggagctggaagaggaactgaaaagagtgaagtccgaggccatcatcgcccgccgtgaacccaaagttctcgag

SEQ ID NO: 862 - DNA (cDNA), 288 bp; double-stranded, linear
gcggctctttgggaggtggtcaggggaaaagatggtcagtgctttttctggacaaatccaggggccaattgaggtggggagtctatgagaagggccctgtcagctgaggcgagggaaagggcagaggacctagaataaaaggatatggcctctctgtgcactagcaggatgggtaggaaagggagatatgaaaagacgaaatggggaccgggtgcggtggctcacgcctgcaatcccagcactctgggaggccaaggcaggcagatcacccgaagtcaggagctcgag

SEQ ID NO: 863 - DNA (cDNA), 326 bp; double-stranded, linear
gctcgagtggaatgggccgaggagatggatttgattctcgtggcaaacgtgaatttgataggcatagtggaagtgatagatcttctttttcacattacagtggcctgaagcacgaggacaaacgtggaggtagcggatctcacaactggggaactgtcaaagacgaattaacagagtcccccaaatacattcagaaacaaatatcttataattacagtgacttggatcaatcaaatgtgactgaggaaacacctgaaggtgaagaacatcatccagtggcagacactgaaaataaggagaatgaagttgaagaggctcttctcgag

SEQ ID NO: 864 - DNA (cDNA), 546 bp; double-stranded, linear
ggaatggggagagggatctaccaaggtnacagcagttttttgagcagctggcacgtgcctctgctgccaacatgatgaggtacagaacccagcacagggaatgctcagcctgtgactgtgagctggatgtgagagtctcctgaggaccctcggtatactcagagcatttcctctcagggtgcaggaagaggaaagcagaggaagtggacttgaaggaccaaaggtgggatcctagctgggccaatcactgagaagccatgtggtcttgggcaagtcattcccttctctgagcctcagtttccccatctgtaaaatggaggtaatgatactatgcctacctcatcatcatgctgtgaagattaaatgagttatgccatggaagtgctgtacattacccattgataatgtctcagtggcctctcaatgaaatggagtgtgacagagtgccacactctgaaacggctcatccccggtgatggtgctgggactagaacccgggcaacctcgcagtgccatgccctactgcatcactacgtccacctcgag

SEQ ID NO: 865 - DNA (cDNA), 808 bp; double-stranded, linear
gaattcggccaaagaggcctaaggattcatagtataaatctttaatttatcacagtctgtattaagtaatactaaaccacttcgcatataaatacatcacaacagtatacttccgtttatgctatcttggtctttgtacttttgtttttgtacattttactttggcataaatgtcaaagtacagtattgttatttagctttaaatattcatttgcctctctccttaatgtaaaaaggcttcttctcaacttcctgacatttcttgctaaactatacacgtctgccctgttttccaacagcacactgttctgtactgtcccttatttatttttttttttttttttttttggagacgagctcgttctttgcccaggccggactgcagtggtgctatttcggctcactgcaaactctgcttcccgggttcacgccattttccggcttcagcttcccgagtagctgggactacaggcgcccgccaccacgcccggctaattttttgtatttttagtagagatggggtttctccgtgttagccaggatggtcttgatctcctgacctcgtgatccgcccacctcggcctcccaaagtgctgggattacaggcgtgagccaccgcacctggcctattctgtccctttttaaagcagttctcttttaaaaaattgtggtaagatataaatcacataaaatttgcagttataaccattttaaagtatataattccatggcattaattacagtcacagtcttttacaactattattactatgtattcctaaagtttttttaccctccccccctcgag

SEQ ID NO: 866 - DNA (cDNA), 361 bp; double-stranded, linear
gaattcggccttcatggcctaaaagaaaatggcttcagtaagttaggatgaaaaatgaaaatataaaataaagaagaaaatctcggggagtttaaaaaaaatgcctcaatttggcaatctacctcctctccccaccccaaactaaaaaaagaaaaaaaggttttctaatgaaaatctttaaaaatactgtcagtattttaaaattttcaacagtattataaaaacattgcatctccccacctctaatatgcatatatatttttcctgctaaaattggtttctacaattgagtaaatggcaaatacatgaagcaatgtccctaaattttataaagaaattatatttaatgcacattctcgag

SEQ ID NO: 867 - DNA (cDNA), 880 bp; double-stranded, linear
gaattcggccaaagaggccggaatttggccctcgaagccaagaattcggcacgaggaaaacagtcttttaacctttcaaaatgccacaatgtgcattttagattgcccttagtttcccaactctcagtatatagagactcaattagaaaagaaatggtgctagtagcttcaacccactggtatgtatttgaggaactgttcctggtagaaggcagtaccgtgtcccttggtattgctactgtgcctgctatgttacttctttatgtatatgatatggaagtaactccttttatacatgtggagaagtttcacagctttttttcatagtcattgcattaaaatgtctgctgaggctgggtgtggtggcttacgccggtaatcccagcactttgggaggccaaggtgggtggatcacctgaggttgggagttcaagaccagcctgaccaatatggtgaaactccgtctctactaaaaatacaaaaattagctgggtatggtggcgcacacctgtaattccagctcccgccgggcgactcgaccaaagaggccggaatttggccctcgaagccaagaattcggcacgaggggtatttttatttttanttnttctgtttctctctngagtgtatagtgtagagggggtttctgtcttgagtgtaggcctggagatttcccttatatggtacaaaccagcaatgaattaagaggtctcttttctccaagatctagtgttttgtactaggagaactctaaaaagtatctatttcactgtagtgccaaagtacaaatttatttggatttattttttgccatcttattttttaatatatttctttttctatgttgtgcttctttcccacctcatctctcctcctcgag

SEQ ID NO: 868 - DNA (cDNA), 366 bp; double-stranded, linear
gaattcggccttcatggcctagtcatggctttagaatctggagaagagtctgactcacttctttcctgaggggatgcactgggtttcacatcaagttcttgagaggatcccgaacgacttctctgccccaggggagtccgagccacagttttctgatcaactgatgattctgacccgcttctttctctctggggggtaagacacttgttgttgagctctggggatgatggagaacgactcctcggcctaggagtctgaggcaaagctttcggttctggggaagaatcacattcgcttctccctctagatggcgttctaggtatatctttcattccaggagaggacccagacaggctgtgcctcgag

SEQ ID NO: 869 - DNA (cDNA), 529 bp; double-stranded, linear
gaattcggccttcatgcctagaggatcttctcctgacccagcatcgctcatcacaatgaagaaccaagacaaaaagaacggggctgccaaacaatccaatccaaaaagcagcccaggacaaccggaagcaggacccgagggagcccaggagcggcccagccaggcggctcctgcagtagaagcagaaggtcccggcagcagccaggctcctcggaagccggagggggctcaagccagaacggctcagtctggggcccttcgtgatgtctctgaggagctgagccgccaactggaagacatactgagcacatactgtgtggacaataaccaggggggccccggcgaggatggggcacagggtgagccggctgaacccgaagatgcagagaagtcccggacctatgtggcaaggaatggggagcctgaaccaactccagtagtcaatggagagaaggaaccctccaagggggatccaaacacagaagagatccggcagagtgacgaggtcggagaccgagaagccctcgag

SEQ ID NO: 870 - DNA (cDNA), 372 bp; double-stranded, linear
gaattcggccttcatggcctaatttgagcttcaagtctccatgtgtataatgtggggttgatgctgtggtgctccaaggtgttggggggttttaggcagagttcttatgcttaatataggatggaaaagtgttcgagcttcttcccttttctctttcttctcttcatctgacatgagcctggggttctacctcttccagataattcatcctggagctactaattctatctccccattgattttagtgtcctgtctgtttctaaatctactgggcagttggagacattgtcttttgttccctcatctatcttctgtatccacagttgataattgtctatgtttttagtgtgttttaaggaaactagtctcgag

SEQ ID NO: 871 - DNA (cDNA), 574 bp; double-stranded, linear
gaattcggccttcatggcctaggtggtgggtgcctgtagtcccagctacttgggaggctgaggcagaagaattgcttgaacccggcaggcagaggttgcagtgagctgagatcgtgccactgcactccagcctgggtgacaagagtgagactctgtctcaaagaaaagaaacaaaaaattatgtacacaaatatggacagcactggcaagaagtgtggcaaaaacacatgtggttctcttgttttgggctcagacatgtggctgtgccattacagacccccgggatttagaatcctccttctgaaaggcgtcctgtgcactcgtgagcaccagcctgaacagatgaaaaggctgagctggaggggctgggacacagcccaccttgacgacagctgctcctggctgtgcgggggggtctccaggaaaggccattctcccactaggatcgccaggccctactgaggctcaagctcctttgctgtttggaatcttccctccccagccccccagcctcatcaaaggctgccttttcctgttcactgaccacagctgctttgactccattagcctcgag

SEQ ID NO: 872 - DNA (cDNA), 528 bp; double-stranded, linear
gaattcggcgttcatggcctaccagactactacggactcatctaacaaaacagcaccgactccagcatccagtgtcaccatcatggctacagatacagcccagcagagcacagtccccacttccaaggccaacgaaatcttggcctcggtcaaggcgaccacccttggtgtatccagtgactcaccggggactacaaccctggctcagcaagtcgcaggcccagtcaacactaccgtggctagaggaggcggctcaggcaaccctactaccaccatcgagagccccaagagcacaaaaagtgcacacaccactacagttgcaacctccacagccacagctaaacctaacaccacaagcagccagaatggagcagaagatacaacaaattctggggggaaaagcagccacagtgtgaccacagacctcacatccactaaggcagaacatctgacgacccctcaccctacaagtccacttagcccccgacaacccacttcgacgcatcctgtggccacccccaactcgag

SEQ ID NO: 873 - DNA (cDNA), 611 bp; double-stranded, linear
gaattcggccttcatggcctaagctgcacaaaacgtagaaagaagacatagcgcctgccaggggaataggaaatgagggcacttacacattaatgtgaattagtaattgtggtatagaaatgttttatagtgaaagattcaaatttgcttttcaagaaaaatgccaaaagctatttaaataattcgaggttacatcgtaggttttgatttttctcaatttaagatacagaaatacagcaagccttaatataaagtttcctaaagtttcttcaagtattttttaaggtggagaaatgcaggaattgtataaccagaattgtttctgcctttagcttttcagaacttgagatgtggcagcactggactgggtttttttaaatgttaggactaggaatgtttgctcttgttaattatgaattaattgattattaagtttagaatgcatttttacaagtatctaactatcaaattgtgtttagtaacttgagtgtatgcacaagtttgatcaacagcaaaatagagttctgaatttcttttaaagtgatgatatattattttgtgaaactttgtgtttgaaaatgtttatttctgtttatggtgtaatactcgag

SEQ ID NO: 874 - DNA (cDNA), 303 bp; double-stranded, linear
gaattcggccttcatggcctacgagcggtgaaggaggagaccaaggaggatgctgaggagaagcaataaatcgtcttattttattttcttttcctctctttcctttcctttttttaaaaaattttaccctgcccctctttttcggtttgtttttattctttcatttttacaagggacgttatataaagaactgaactcaacattcaggttgtttttttttttgtttctaagtttttgccctattgaagatgacttcagaaaatccattccccagtcatgaaaatgtactgtgctattctcgag

SEQ ID NO: 875 - DNA (cDNA), 348 bp; double-stranded, linear
gaattcggcctcatggcctaacggcagcggcagcctctgaaaagaatcggggcccaagaaaaggcggtcgtgttatcgctcccaggaaggcgcgcgtcgtgcagcagcaaaagctcaagaagaacctagaagtcggaatccggaagaagatcgaacatgacgtggtgatgaaagccagcagcagcctgcccaagaagctggcactgctgaaggccccagccaagaagaaaggggcagctgccgccacctcctccaagacaccttcctgaggacgctggccccagtgcaggccaacatcccaccccctacctccatatgggaccttgcaagtcatcccacttcctcgag

SEQ ID NO: 876 - DNA (cDNA), 586 bp; double-stranded, linear
gaattcggccaaagaggccggaatttggccctcgaagccaagaattcggcacgaggagactattttccatttcacacaagaaatctttgattattcagtaaaaagaggaaatataagaaaaaaaatcagactagtctggccaacatggtctaaaaatacaaaattagccaggcatggtggcgggcgcctgtaatcccagctacttgggaggcccaagcaggagaatcgcttggactcgggaggcggaggttgcagtgagccgagatcatgccactgcactccagcctggcagacagagcaagactccctctccaaaaaagttaaaaaaaaaaaagaaaaaaaaggccgggtgcagtggttcggcctcccaaagtgcggggattacaggcgtgagccaccatgcccggccactttctgtattttttaataaataagaaatacacatttagtagtagttacaaagatctgtaggccgtagcaaatattcagtaactggaagatgccaatgaacattgttgggtagtatttaaataacaaaatgttcaaatatttgacaagattaacaacactacacggccttctcgag

SEQ ID NO: 877 - DNA (cDNA), 445 bp; double-stranded, linear
gaattcggccaaagaggccggaatttggccctcgaagccaagaattcggcacgagggtaattttaaaaatttatgtattttctagcatttgcctcaaggattgaaatttttttttttacttgtgtttacaggtagaattctttatttaaaaagtcagttgaatatcaaaactatttgatattcttcagactggaatattattctctagtgtagaagaaaacattttctgcttacaaaacaaatagtaaatactctaaaataggggttggcaaacttttcttaaataaaaggccagatggtaactattttaggttttgtgggccatgtgttgataactattttaggttttgtgggctacgtatggggtcactctcccattctctctctctctctctctctctctctctctctctctctttctgtgtgtgtgagcggcgctctcgag

SEQ ID NO: 878 - DNA (cDNA), 586 bp; double-stranded, linear
gaattcggccaaagagccggaatttggccctcgaagccaagaattcggcacgagggggtctccattccccgagaagccaggggcagggtgggatggggaagaccaggagcagagtcgagcctcacagaagccagcgcgggtctctgctcagcaccccagccggggctctggacccagggtaacagccccagttcatcccaacccctctcagagcctcaagaggggtagctcggctgccggaagagaggggtgccctatccctggcaacccctccacgtagcgtaccccagcacctgccaccgcctttgccatttctttgagcttgaagttaactctcttagagtctaactttggttcatttctgcacaggtacaatagatgactttatttgtttaaaatgtttaatatatatacatacatatatatatatttgtctgtaagaattatgttttaaacagctgctgtagagtacctttttttaagtaaatcttacagtggagtatattttttaaagcacaaaattggtgccaagactgggtgagaaatgtacattacccccttattattttgcgtcggattcctcgag

SEQ ID NO: 879 - DNA (cDNA), 414 bp; double-stranded, linear
gaattcggccaaagagccggaatttggccctcgaagccaagaattcggcacgaggggaaaatcttgtcctaaaaatatatgagtttgggggtaaggggtgggatagccaagcaaaatcagtaattattttaaaatgaacatatgaatttttattaacttttagttaaatacagattttacaacgaggtcagcataagcctaaatctatatagagggctaactcaggcattgtcttgtttatttgtagactggattaaaaacaacctgtcctgttttgtcagttcccagcttcttcgtttagaataaattagaccaaaagaagaaacgtgcttgtctctgtatacccgcagaatgaagttactgttgttaaaaccggattttttcattttactaggttccgctctctccctcgag

SEQ ID NO: 880 - DNA (cDNA), 402 bp; double-stranded, linear
gaattcggccaaagaggccggaatttggcctcgaagccaagaattcggcacgagggtaattttaaaaatttatgtattttctagcatttgcctcaaggattgaaatttttttttttacttgtgtttacaggtagaattctttatttaaaaagtcagttgaatatcaaaactatttgatattcttcagactggaatattattctctagtgtagaagaaaacattttctgcttacaaaacaaatagtaaatactctaaaataggggttggcaaacttttcttaaataaaaggccagatggtaactattttaggttttgtgggccatgtgttgataactattttaggttttgtgggctacgtatggtgtcattctcctattctctctctatcacctaccctcgag

SEQ ID NO: 881 - DNA (cDNA), 352 bp; double-stranded, linear
gaattcggccaaagaggccggaatttggccctcgaagccaagaattcggcacgaggggccgtttttttttttttttttttttttttcnngnnaggctttccctaggtgatttttaattgctattataaataaatatccatttttcccataaaatattgctatatgttagtatattaatcttgtactgttacctttttcaactctattggttctgatagcttgtcagttgtctacctttcatcttctaggtaaatatttcttacaaataatgagatttgctcctactttccaatttatctcattacttttactnntcttactgcactggctaggacaccactaccttctcgag

SEQ ID NO: 882 - DNA (cDNA), 351 bp; double-stranded, linear
tttttttttttttttaacttaaaaatagttgtatttatattccacaatttgttcaaatactggttttcttataaactttctacaggatgtttttaaacaaattcttcacattgtgttttgactatgtacttgcggaatttcagggaaatagttctgtgtatttttaatagcttaatttgtactaaagggatggtaggtggtcacatgcagtccatgtgggattctaacatgacatttagtgagttttctgatgtggaccatccctttgatgctgaaggtaatgcatctgttgaaagaagtgactgtagatttggattactgctctctgcatctccctcttttctgctcgag

SEQ ID NO: 883 - DNA (cDNA), 548 bp; double-stranded, linear
gaattcggccttcatggcaagaaggagncttagcatcaaactttggaaagggaagccagagaaaaaggtagaatggacaagtgacactgtggacaatgaacacatgggccgccgttcatccaaatgctgctgtatttatgagaaaactcgggcctttggcgagagctccacggaaagtgatgaggaggaagaagagggctgtggcatacacactgtgtacgtggccaccgcaaaggacgggttntgcaaccctaggaccgacccccaccacccttccccagctcctgaccnttcccagccccctccagggccaatgcagcactaaatccctctctcctccagcattcctgtgtctgtctggccctaaatgtatccatgtggctacttctccagccccctccttccctntcttctgcctgatagagggaagaggaagaggaggacgaacagagatcctgaaattctgacttgctgctattccagaacccagcctcctgggtttccccagtcctcatttttcctcccaatacccacccttctctctcgag

SEQ ID NO: 884 - DNA (cDNA), 446 bp; double-stranded, linear
gaattcggccttcatggcctaaaaaatacaaaaaattagccgggcgtgttggcgggcgcctgtagtcccagctacttgggaggctgaggcaggagaatggcatgaacctgggaggcggagcttgcagtgagccgagatcgcgccactgcactccaacctgggagacacagcgagactccgtctccnaaaaaaaaaaaaaaaaaaaaacacacttgtcttacaaagactaacaaaagatacaaaataaaataactttacagcatcattagaaagcgaacaaaatcctaagatagatacatttatctttcttgttttagaactttttctgtgtaatggaatggaaatgcttaatcttgtttcaatgttttcagtgtttgtgctttgtcaaattgaggttggatgttaaagcccttactactgtattatacaaagcagcgaacctcgag

SEQ ID NO: 885 - DNA (cDNA), 344 bp; double-stranded, linear
gaattcggccttcatggcctagccggcgccgccgngtcttcccggtctcctttcccggccgcacagggttttataggatcacattgacaaaagtaccatggagttttatgagtcagcatattttattgttcttattccttcaatagttattacagtaattttcctcttcttctggcttttcatgaaagaaacattatatgatgaagttcttgcaaaacagaaaagagaacaaaagcttattcctaccaaaacagataaaaagaaagcagaaaagaaaaagaataaaaagaaagaaatccagaatggaaacctccatgaatccgactctgagagtgtacctcgag

SEQ ID NO: 886 - DNA (cDNA), 388 bp; double-stranded, linear
gaattcggccttcatggcctaaaaatctaaattaactgatgaataatttaaaacagaatttcaacattgagacaatgtagagatatattatggtataaaatgaagcatttgcacgaactttttagctaaaatttgtttcaaagaagttgcttttgtttttagtgtaccttgagttcaacacagatgtgaatgcccgctttttccagaagggttcttgggagaaaacactggagaagttctaagcactttttttttttttttttttttttttttttttagagatggtttcttactctgttgttcaggctggagtgcagtgttgcaatcatagctcactgcagccttgacctcctggcctcaagtgatacccctgtctcagcctctcgag

SEQ ID NO: 887 - DNA (cDNA), 364 bp; double-stranded, linear
gccccagtctaaggcatttaaaattaaacagctcttcaacgccccaagttatttcatcaggctaagaacttctccgagaaacgcacaagaaggcaggcaaacaggtgggtaggtgagaggtcacggggctccatctgcaagctccatctacaaggcatcaatctgcgttgtggcatcaacgttaaaatgttctacagcttagggatcttcttgaagcaaggttccaagcacaaaactagtatgaccggaggctcaatttagaagatgcagcatctgaaaacctttaccccaggaaaggaggggtgcctgctggcattcatgggctctggaacaagcatttattcaaagctgatggcccctcgag

SEQ ID NO: 888 - DNA (cDNA), 416 bp; double-stranded, linear
gcacccccaaatgccagcctctcctttcttcccatccaccagtatactgcggggccatttctggtctttgtccaacaggaaacccatttctggtgggatatgccttccagtgccacagggccactcaccccatgcatctctgtcctgcccgtcagtgctgggacggacagcaagggcaagcccagtgtctggcggataggtgggtgggaacagagaggggagaatgccgtcctaagcttctgcttggggatcccccacacgacctgggtactgcctgggaaacctgtcctaagtaaaactatggacctcgcctcgcccaccggcctgcgaagccagcatctccgtgaaggtggatggaagcgcctttgtcctcattttgagctgcaagctgggtcagcggctctgaagccctcgag

SEQ ID NO: 889 - DNA (cDNA), 349 bp; double-stranded, linear
gtaggccatgaaggccgaatggaaaaagtcagttaaagaggactcagtccccacaggtgcggaggagaatgtggtgtgtgagtcaccagtagagattataaagtccaaggaagtagaatcagccttacaaacagtggacctcaacgaaggagatgctgcacctgaacccacagaagcgaaactcaaaagagaagaaagcaaaccaagaacctctctgatggcgtttctcagacaaatgacatcagactccacagaaaagactatcacaccgccagagcctgaaccaacaggagcaccacagaagggtaaagagggctcctcgaaggacaagaagtcagcagctctcgag

SEQ ID NO: 890 - DNA (cDNA), 719 bp; double-stranded, linear
gaattcggccttcatggcctagacctgcctcgaggatgctctgggtttgctgtagtcgtctgttactggtcntgttaggaggagggccagggggacccccacctggggcagtcccttctgtcccttcagcaggtggctgagctggagcagacatttttctgacagagagagtgagggtctgttcctctccggaggctgcggcgagacacccggcgagggacgctgcggctgaagtggacggaactgccaagctccgcctcgcgccgactaccccgcggtctagctgcgctggggtttcaccatgttggccaggatggtctcgatctcttgaccttgtgatctgcctgcctcggcctcccaaagtgctggaattacaggtatgagccactgtgcctgacacctgtcaaattattttactgtgtttatttaccatgtttctttcactgtggggtctctgtccttgctgttttgtttttcttttaacttcttttgttatttaggaaggtttatattaatattttaattctacattggataattcctatatcaaaactattgttgacaatcagttacagatggaacttcgtctactctttctccccttctcactcctgctctttctccctttctcactccagcagttgactagtctcattgaaaaaacaaattggggccggccaggcatgatggctcatgcctgtaatcccagacaactcgag

SEQ ID NO: 891 - DNA (cDNA), 453 bp; double-stranded, linear
gaattcggccttcatggcctagatactccgctgaagatctgatgtcaccccaaatgcatggctccagcctcagttcagctttccacactgcttgcagaaattccttcatttatcttgagtttctcctctcactcccatggtagcttttccattcccactgcctcttctcacatttcagtagatgagaatagaagccataggaagcaaacttcctcaacctccagccaaccgccgagcgatgggcatctctcgggacaactggcacaagcgccgcaaaaccgggggcaagagaaagccctaccacaagaagcggaagtatgagttggggcgcccagctgccaacaccaagattggcccccgccgcatccacacagtccgtgtgcggggaggtaacaagaaataccgtgccctgaggttggacgtggggaatttctcctggggctcagactcgag

SEQ ID NO: 892 - DNA (cDNA), 350 bp; double-stranded, linear
gaattcggccttcatggcctaccagcctctgggctgaggcaaagacctctgaggccccgtccacccaggacccctccacccaggcctccactgcgtcctccccagccccagaggagaatgctccgtctgaaggccagcgtgtgtggggtcagggacagagccccaggccagagaactctctggagcgggaggagatgggtcccgtgccagcgcacacggatgccttccaggactgggggcctggcagcatggcccacgtctctgtggtccctgtctcctcagaagggacccccagcagggagccagtggcttcaggcagctggacccctaaggctgaggaacccctcgag

SEQ ID NO: 893 - DNA (cDNA), 467 bp; double-stranded, linear
aacaggagatggacaagctgaaggagcaatatgatgctgagttgcaggccctgagggagagtgtggaagaagcaaccaagaatgtcgaggtcttggcgagcaggagcaacacttcagagcaagaccaggcggggactgaaatgcgcgtgaagcttctgcaggaggagaatgagaagctgcagggaagaagcgaagagctggagcggagagttgctcagcttcaaaggcagatcgaggacctgaaaggcgatgaagccaaggcgaaggaaacgctgaagaagtacgagggagaaatacgacagttagaggaggcccttgtgcacgccagaaaggaagaaaaagaagctgtgtcagccagaagggccctggagaatgaactggaggctgctcagggaaatctgagtcagactacccaggagcagaagcagttgtctgagaagctcaaagaggagagtgaggcgctcgag

SEQ ID NO: 894 - DNA (cDNA), 315 bp; double-stranded, linear
gaattcgggcttcatggcctactcagctttcctggtctcccatctgaactgcttctttgtgcacctcttgttctttctcttggctcccagtcttgattcctgtgatcactcttgcatcactaattgcacaagtgatttcaggtgcaattctgattagcctgcgtccacacagtgatcgatgatcctatgtgcctagaaaggacactgtgtgctgctcatgacctgcaacaggaaaaaagccatttcttgttagcagtgtaagaaccttagagcaaaggagttgaccttctgattgaatataagcacaacctcgag

SEQ ID NO: 895 - DNA (cDNA), 302 bp; double-stranded, linear
gggcttagttaggagctatggctaaacatcatcctgatttgatcttttgccgcaagcaggctggtgttgccatcggaagactgtgtgaaaaatgtgatggcaagtgtgtgatttgtgactcctatgtgcgtccctgcactctggtgcgcatatgtgatgagtgtaactatggatcttaccaggggcgctgtgtgatctgtggaggacctggggtctctgatgcctattattgtaaggagtgcaccatccaggagaaggacagagatggctgcccaaagattgtcaatctggaggaactcgag

SEQ ID NO: 896 - DNA (cDNA), 473 bp; double-stranded, linear
gaattcggccttcatggnctantctcatttnaaatatatccttactgaaacatctggaataacgtctgaccaaatatctgggtacagtgatccagccaagttgagacatgaaattaatcaccatggcctacatttttatctgtttggctgcaattctgtcaaaggcttctgctcttcataacatttcactcactagctccatgaagccatatgatacaaaccttgcctgtgtagccttcacttttttccaaaagaagtctattaaatgccaatcaagtatcttctcctccaagctcagtagctcgggccttcaacagctgttccccattccgatccatctccctgagctaccctggcattcttatcaggacactggaggaatctatgtatgtgcctctaaagattcagcacccaaacatgatagaaatcactgtgttcacactgtatctctatatctgcccatcccgctcgag

SEQ ID NO: 897 - DNA (cDNA), 594 bp; double-stranded, linear
gctcgagtgaagtggtatctcattgtggtttgggttttaattttataatattttaatttttaaaatcaaaagaatatactggggctggggtggtggctcaagcctgtaatcccagcaccctggggggccaaagggggtggaccacctgagtttatgagttcaagaccagcctggccaacacggtgaaaccccatctccactaaacatacaaaactcagccgggtatggtggcaggcacccgtaatcccagcctctcaggaggctgaaacaggagaatcacctgatccgggaggtggaggctgccatgagtcagaatcacgtcactgcactccagcctgagaggagacccgtacaaaaaaaaaaaaaaaaaatatatatatatacacacacacacacacacacaaggattttagatttgaaaatgatgttttttactcatttcaaaatgtactgtaacctttctttggttcttactgttttcatttaactttctctgttttcaagaaaaattgtctttattgacatttgtaaaaaagaatgtgttttgcccagttattaagtattttatttttatgcaatttcagaacactcgag

SEQ ID NO: 898 - DNA (cDNA), 302 bp; double-stranded, linear
gaattcggccttcatggcctactgtacattttttttaaagtttgttgaaaagaatattgtcttattctataaaacatttcaaacctagttagagatttgtaatcaaaaaacatttgcgcagaaagcagcacttagggctgcctgttctataccctacagtcagacaggaaaagaactgaaaatggcacccttctgacattctgaggcagctggactggcagccaagtaaaggagagtgatgaggtggtgtggggagggtggggaggcagcgcgagggtgctctccacagggtaggtctcgag

SEQ ID NO: 899 - DNA (cDNA), 475 bp; double-stranded, linear
gcggccttcatggcctagtgcttgtcagtttggaaagtcacagggagtttaccattctataattagagtaggaggaaaatgagaacccactggtagaagaagaagcaacagtcttctagggtctggcatttgatgagataggtattcagttactgtgcatttccattgtttttccatggcagaacatacggcagagatttgggaactcgcatgcctgaagccaggttattcttatgttctgtaactatgttgctcgcagggctgttgttgtcagagtagtgagttgtgccccagacaaatggggtgctggtctgctcccacaaatctttatcccagtcttcatcgcaaggagggcactgccaagtgctctcagccagagtctcttgtctaaggctcctggtttggttgacaacatcttgctcaatacaacttctgtcatcacagcttgagatatgatgactaatttcagctcgag

SEQ ID NO: 900 - DNA (cDNA), 507 bp; double-stranded, linear
gaattcggccttcatggcctacagctgcctttttctttaaaggggttcttgtcttctggaattccctttactagaggatcctctccagaacgttcttcaatatagttctttatttcttcagaacatttagacacttgttgtctctgcaacttcacttctttgcgaagctgctcaacttccattttcagtttttccttctctggcaaatcttcgatgtgaagggcaggcattttcgccccagaaccgggctcaggctagctctggcagcggagccgctggaagagcggcgaagctcggcgcgtcccgaaacaactgaaggcctggcccgccgcccacccgcgcaggatgtgactgcagccctgctgcggtccccagctccccgagggcttggctttctccgggacgcttgtcacgccagcgtgccccagcttcctaggacctgagaactctgccttttctcaagtccctgcaacccaggaggcctgcccgggtgctagtaggccatga

SEQ ID NO: 901 - DNA (cDNA), 495 bp; double-stranded, linear
gaattcggccttcatggcctagtttggattttcatattagggatactcaactggtattattattctggcccctgcaaatttttcagtaggtcccctagtatgtcatgccagggactatgngagttcctgggaatagcactgtaanacattcttgagtgggtccttgactccattgagtttataatctcgtaggaggaaggctatgaagaattctaataaagcaaagcaagcaatcacaacaaaccttcctctttaacttatcaaaaatggaaactttgaagagctgctctttaataaatcattggaaagcaccaggacccaggtgttttgactcagcctcatttcagactgagatctgaggccatgataactcatgtgcctatatatgctgataatcaccattacctataccattctttacattctctcatctacacaatcatcttcaactctctctcatccacttcagcgattgaattctttaccggcctcgag

SEQ ID NO: 902 - DNA (cDNA), 266 bp; double-stranded, linear
gaattcggccaaagaggcctagaattccagacctagctcaacccatgcctcctttccttccttccctccttcctttctttctttttccttttctccttccctcccttctccctttcttccttctctccctctttctctttctcccttcttcctgctcttccttccttcctccctccctcccctcccttctttcctttcctccctcccttccattctttcctcccccaccccccgtttcttctctttggagagatgtacagctcgag

SEQ ID NO: 903 - DNA (cDNA), 410 bp; double-stranded, linear
gaattcggccaaagaggcctaaatgagagctgagtgaagtggatgccccttataaaaacatcagatctcgtgagaacttactatcactagaatagcatgggggaaccaccccatgattcagttacctgcccccaggtctctgccaccacacatggggattatgggaactacaactcaagatgagatttgggtggggacacaggcaaattatatcagctgttgtgctcattagtttgtatatcatccttggctcctttagcactataagggcaggattgagtccttgcaacagaaaccattcagcctgcaaagctgaacctatttactttctgaccctttatggaaaagtttactgatctctggactagacagttttttaaaaatgacatcttatgaccgggattctcgag

SEQ ID NO: 904 - DNA (cDNA), 326 bp; double-stranded, linear
gaattcggccaaagaggcctagccgagactctgtctcaaaaaaaagaaaaaaagctgctttgggtcttatgagggaggggactgggaatctaggtgtttcaagcgccccaggcgattcttaaggtcacacaagcttgggagacacttcattaagcaaaatcttttggccgttttgttctggttgagcctcagtgtctattcattgagtggtcaccaagagtttggggtggactgatcatcagcatttacaggtttggaaattgaatttagttttactactcagagcttattagacttgagcagatttaaacggaaggacactcgag

SEQ ID NO: 905 - DNA (cDNA), 410 bp; double-stranded, linear
gaattcggccaaagaggcctaggaactgttttgaccctgaaggctatttaatccactgtcccctacaaggcctcacaagtgctgggggaaaaaaaacagcaatgaggatgatcctgagttaatgtgtatgctccgcaagagagcttgcctataccttgattatttcataaaatcacatgttaatacattgctttcagaatgaaatactgacttgatctgataggagaaaatggtaatatttcatagttgttttccaaagacaaatttaaatgttgtctgttatctccttacttagtttaagaatttagttttgaaccccattgactttgtcatttgcaattttaaaaatatttgggactgggcatggtcgctcacgcctgtaatcccagcactttgggaggcatctcgag

SEQ ID NO: 906 - DNA (cDNA), 498 bp; double-stranded, linear
gaattcggccaaagaggcctacgcttcccgggttcaagcgattctcctgcctcagccttttgagtggctgggactacaggtggatgcctccatgcctggctaattttttgtattttagtggagacagggtttcaccgtgttgcccgggctggtcttgaactcgtgagctcgggcaatccacactccttggcctcccaaagtgctaggattacaggtgtgagccactgcacccggtcgaggtacagttttgaagttcatgcaaatctcatcatttgctcttctgcaacaaaacattttctttcaacttattttgcctgtgtgaagctcagtgctttaactcatatatggagttatcttcttccctcagactggagacgttggtgaaattggggctagactgaagatgtctaaggtggcttgattgacaaaggtctctcctcatccccaaaataaataacattttttcatttataatagtaatacaccagtcgactcgag

SEQ ID NO: 907 - DNA (cDNA), 481 bp; double-stranded, linear
gaattcggccaaagaggcctaaactggtgctggtttcacatcacgacagcaacgggattcttttgctttgaaaatgttgcagtccacctgtccaacttgatcttccggacatttgacttgtttctggttatccaccatctctttgcctttcttgggtttcttggctgcttggtcaatctccaagctggccactatctagctatgaccacgttgctcctggagatgagcacgccctttacctgcgtttcctggatgctcttaaaggcgggctggtccgagtctctgttttggaagctcaaccagtggctgatgattcacatgtttcactgccgcatggttctaacctaccacatgtggtgggtgtgtttctggcactgggacggcctggtcagcagcctgtatctgcctcatttgacactgttccttgtcggactggctctgcttacgctaatcattaatccatattggacccagactcgag

SEQ ID NO: 908 - DNA (cDNA), 764 bp; double-stranded, linear
gaattcggccaaagaggcctagaaacaatggttttcagacactgaaagttcatagtacaggactgtgatctctgcgagaagggggaataatgaggtgagtccagtgattgctcaggcgaatggcctggaggcagtttctaggcagcaaagcagggagagggaagccagagaccagtggtcctgctgtgttgaggagatggagatcagtgtcaccggaggccaaggtgagtaagtgagaggagaggaggcagcagcacacagacagagagtgctgtagatctgcagtgggtcccctggagtccttggttgagtgaaggtgttagaagaaactacttaagccaagaaatgagtaactggaaattagtagagcaaataatttacagatcatctatggggctgggaaaagtttgtgtttccactagccagagtagaaataactcataatgcatgggtcatcaggtggagtcctccaacaggtgttgccttagtactgaggtcaaattgtccctagaccaaaggcttctttggacttcccctaacaaagcttaaagacaagccttggaaggatcaaactaatttcaagaaacttaactgtgaatcagaataaaacccaataccatttataggaatataacaaaatccatcaacanacnacataacactcataattaccaacattcagtaaaaaattactggaaacagagaaatataaattatggcccataattaggaaaaaagggtaatcattagaggtagaactcgag

SEQ ID NO: 909 - DNA (cDNA), 157 bp; double-stranded, linear
gaattcggccaaagaggcctactaaggacttgtttcggaaggagctgactggccaatcacaattgcgaagatgaaggctctgtgggccgtgctgttggtcacattgctgacaggatgcctagccgagggagagccggaggtgacagatcagctcgag

SEQ ID NO: 910 - DNA (cDNA), 487 bp; double-stranded, linear
gaattcgcggccgcgtcgacagaatagacctggtttgtgaattatggcctggatttcacttatactctctctcctggctctcagctcaggggccatttcccaggctgttgtgactcaggaatctgcactcaccacatcacctggtgaaacagtcacactcacttgtcgctcaagtactggggctgttacaactagtaactatgccaactgggtccaagaaaaaccagatcatttattcactggtctaataggtggtaccaacaaccgagctccaggtgttcctgccagattctcaggctccctgattggagacaaggctgccctcaccatcacaggggcacagactgaggatgaggcaatatatttctgtgctctatggtacagcaaccattgggtgttcggtggaggaaccaaactgactgtcctaggccagcccaagtcttcgccatcagtcaccctgtttccaccttcctctgaagagctcgag

SEQ ID NO: 911 - DNA (cDNA), 478 bp; double-stranded, linear
gaattcgcggccgcgtcgacagttactgagcacacaggacctcacaatgggatggagctatatcatcctctttttggtagcaacagctacaggtgtccactcccaggtccaactgcagcagcctggggctgagctggtaaagcctggggcttcagtgaagttgtcctgcaaggcttctggctacactttcaccagctactggatgcactgggtgaagcagaggcctggacaaggccttgagtggattggaatgattcatcctaatagtggtagtactaactacaatgagaagttcaagagcaaggccacactgactgtagacaaatcctccagcacagcctacatgcaactcagcagcctgacatctgaggactctgcggtctattactgtgcaagggacagctcaggctacgactatgctatggactactggggtcaaggaacctcagtcaccgtctcctcagccaaaacgctcgag

SEQ ID NO: 912 - DNA (cDNA), 433 bp; double-stranded, linear
gaattcgcggccgcgtcgacccaggatgccgcgcagcagagctctgattctgggggtcctcgccctgaccaccatgctcagcctctgtggaggtgaagacgacattgaggccgaccacgtaggcacctatggtataagtgtatatcagtctcctggagacattggccagtacacatttgaatttgatggtgatgagttgttctatgtggacttggataagaaggagactgtctggatgcttcctgagtttggccaattggcaagctttgacccccaaggtggactgcaaaacatagctgtagtaaaacacaacttgggagtcttgactaagaggtcaaattccaccccagctaccaatgaggctcctcaagcgactgtgttccccaagtcccctgtgctgctgggtcagcccaacaccctcatcatgctcgag

SEQ ID NO: 913 - DNA (cDNA), 139 bp; double-stranded, linear
gaattcgcggccgcgtcgacgcaagatggattcacaggcccaggttcttatattgctgctgctatgggtatctggtacctgtggggacattgtgatgtcacagtctccatcctccctggctgtgtcagcaggagagaag

SEQ ID NO: 914 - DNA (cDNA), 166 bp; double-stranded, linear
gaattcgcggccgcgtcgacatcatggctaccctgcgtgtcccactcctggtggctctcgtccttcttgctgtggcaattcagacctctgatgcaggtccctatggtgccaatgtggaagacagtatctgctgccaggactacatccgtcaccctctgccatcacg

SEQ ID NO: 915 - DNA (cDNA), 590 bp; double-stranded, linear
gaattcgcggccgcgtcgacttcttgggcagcacagaagacagagccgattttgaccaagctatgttccctgtgatggagaccttcgaaatcaatgatccagtgcccaagaagagaaatggggggaccttctgcatggcagtcatggccatccacctgatcctgctcacggcaggtactgcactgctgctgattcaagttctcaatctgcaggagcagctccagatgctagagatgtgctgtggcaatggatcactagctatcgaggacaagcccttcttctcgctgcagtgggcacccaaaacacacctggtacctagagcacaggggctgcaagccttgcaggcccagctcagctgggtccataccagccaggagcaactccgtcagcagttcaacaacctcactcaaaatccagagttgttccagattaaaggtgaacgaggctctccaggtccaaaaggggccccgggtgctcctggaatccccgggctgcctgggccagctgctgagaagggagaaaagggggctgcaggtcgtgatggaaccccaggtgtccaaggaccccagggcccaccaggaaaactcgag

SEQ ID NO: 916 - DNA (cDNA), 592 bp; double-stranded, linear
gaattcgcggccgcgtcgacggaagagcaatgaaaacatatgctcctacattattcatgtttctatggctgcagctggatgggatgagccaaggtgagcaggtggagcagcttccttccatcctgagagtccaggagggatccngtgccagcatcaactgcacttatgagaacagtgcctccaactacttcccttggtataagcaagaacctggagagaatcctaagctcatcattgacattcgttcaaatatggaaagaaagcagacccaaggactcatcgttttactggataagaaagccaaacgttctccctgcacatcacagacacccagcctggagactcagccatgtacttctgtgctgcaagtgagagcaccaatacaggcaaattaacctttggggatgggaccgtgctcacagtgaagccaaacatccagaacccagaacctgctgtgtaccagttaaaagatcctcggtctcaggacagcaccctctgcctgttcaccgactttgactcccaaatcaatgtgccgaaaaccatggaatctggaacgttcatcactgacaaaactgtgctggacaatctcgag

SEQ ID NO: 917 - DNA (cDNA), 166 bp; double-stranded, linear
gaattcgcggccgcgtcgacgaatgaggtgctctcttcagttcctgggggtgcttatgttctggatctctggagtcagtggggatattgtgataacccaggatgaactctccaatcctgtcacttctggagaatcagtttccatctcctgcaggtctagtaagagc

SEQ ID NO: 918 - DNA (cDNA), 200 bp; double-stranded, linear
gaattcgcggccgcgtcgacgtctgagaggaacccttctctgaggatggacacttctcacactacaaagtcctgtttgctgattcttcttgtggccctactgtgtgcagaaagagctcagggactggagtgttaccagtgctatggagtcccatttgagacttcttgcccatcaattacctgcccctaccctatagtgag

SEQ ID NO: 919 - DNA (cDNA), 231 bp; double-stranded, linear
gaattcgcggccgcgtcgacccaaccttccggaagcctccccatcagcaccatgaacccaagtgctgccgtcattttctgcctcatcctgctgggtctgagtgggactcaagggatccctctcgcaaggacggtccgctgcaactgcatccatatcgatgacgggccagtgagaatgagggccatagggaagcttgaaatcatccctgcgagcctatcctgcccacgtgtt

SEQ ID NO: 920 - DNA (cDNA), 115 bp; double-stranded, linear
gaattcgcggccgcgtcgacgttttgttattgttacgaagtaaatgattcgtatgctgtacatagctgttatagaagtggcgattagtgtaattagtagggctcaggctctcgag

SEQ ID NO: 921 - DNA (cDNA), 213 bp; double-stranded, linear
gttgaattctagaaatcaaaattaatttgacaaaggaaaagcagatgccggaaacttcttcccagtctgtcatacaattcaccactggccaggtgctgagagaagcattagggaacagtgtgggttgtgtcagagttggacggctccatccctttggcttcattatcttcctcctcatggagattctaaagcaacccgtcgacgcggccgcga

SEQ ID NO: 922 - DNA (cDNA), 504 bp; double-stranded, linear
gaattcggccaagaggcctacttagaagccaaagaaggagatttgcacaggatagaaatcccattcaaattccacatgctgcattcagggctggtccacggcctggctttctggtttgacgttgctttcatcggctccataatgaccgtgtggctgtccacagccccgacagagcccctgacccactggtaccaggtgcggtgcctgttccagtcaccactgttcgccaaggcaggggacacgctctcagggacatgtctgcttattgccaacaaaagacagagctacgacatcagtattgtggcccaggtggaccagaccggctccaagtccagtaacctcctggatctgaaaaaccccttctttagatacacgggcacaacgccctcacccccacccggctcccactacacatctccctcggaaaacatgtggaacacgggcagcacctacaacctcagcagcgggatggccgtggcagggatgccgaccaccagactcgag

SEQ ID NO: 923 - DNA (cDNA), 119 bp; double-stranded, linear
gaattcggccaaagaggcctacattcatcaagtcatccaacttctatagtcaaagcaggatcatgtggcgaagcatatgctccacaagggtggatagcttttttcatggaattctcgag

SEQ ID NO: 924 - DNA (cDNA), 706 bp; double-stranded, linear
gaattcggccaaagaggcctaaagagagtggaggaggaggacaagattgatactatgagagttggaggacataattcatggatcatagctccagaagtgaaaagggaggaaatgtagacagaggaaggcattagccattgagaagaatagggacatattttctttactctcttgtcagaggaagatagctgggggagtatagacaagttgtaagaatgaaggaaggaaggcaagagcagacttgtcggatgaattttattttctctatgaagtttgagaattaaactttatgctgagaaggagggcaggagagactgtatatggaatgtaaggtttgggataaccaatgtaagttttgggaatgagaaagccacctagggatgaggaaaaaatatttaaaattttgtatccactgaaaattcttcaacagtgtaaaatgaagcatgctcaactggaaatggtcatatatctaaaagaaaatggatttattttgttatttttctctatatttgtagtattttacagtaagcatgtattacctttatagtgaaaaagtgtcatttttttacattggtcaattttttgttattaaatttcatgcttgtttttaattgtttcttgtgtgtatgattgcaatatcaggtatttgatgtggtgatgtgtgtgattcagaagtcagaagacttaagttccgacacccctcgag

SEQ ID NO: 925 - DNA (cDNA), 651 bp; double-stranded, linear
gaattcggccaaagaggcctaggattcaaattattctgacagacctgtgtggcagttcaggctgatagctggagtttcttgtctttttctacatggcctttcatcttccaagagttagactatgattcttcacatcatgatggcttagggtcccaaaaagaaaagagtagaacttgcaatacctcttaagccctatgcccaagaactcatacagtgatacttctgccaccttgtgttagtcaaagcaagtcacaaggccagccagattcaaaagaatggaaaaatagactcaatttcctggtgagaagtagcaaggtcacattgcaaaggagtctggacatgggaaggagttactcatttgtggcctttataataatcttccacaaatgcctgtaatttgggcactgtgcttagtactggtgatagaagataagtagcttatttcagtatcttaattttgttttatatatttgataattttatgatgcaggttcactgtgcactggtatcaatcccaggggaggactgtaaacaccttgccaatactgtgtaccagtatcaatccactggcatgagtctggtgagacagaacacacaataagtttagggaagcaactttattactcacagacaggcagcaagggactcgag

SEQ ID NO: 926 - DNA (cDNA), 700 bp; double-stranded, linear
gaattcggccaaagaggcctaaaaagatgaaaggaccaatcaaagatttaattaaagctaaagggaaagatttagagacagagaatgaagaaagaaattctaagttggtggtggacaaaccagaacagacagtgaagacctttccactgccagctgttggtttggaaagagcagctactacaaaggcagataaagacatcaagaatccaatccaaccatccttcaaaatgttaaaaaatactaaaccaatgactactttccaagaagaaaccaaggctcagttttacgcatcagagaaaaccctcctaaaagagaacttgccaaagatttgcctaaatcaggagaaagtcgatgtaatccttcagaagctggagcgtctttactggttggctcaatagaaccttctttgtcaaatcaagatagaaaatattcctcaattctacctaatgatgtacaaactacctctggtgatctcaaattggacaaaattgatccccaaagacaggaaattctagtaaaattactagatgtgcctactggtgattgtcatatttctccaaagaatgtcagtgatggggttaaaagggtaagaacattattaagcaatgagagagattccaaaggcagggatcacctctcaggagtccctactgatgttacagttactgagactccagaaaagaacacagaatccctcgag

SEQ ID NO: 927 - DNA (cDNA), 378 bp; double-stranded, linear
gaattcggccaaagaggcctaggggtggtggaggcgtggacccaacggtgaccgtcgggatggagcaagggcaaggagaggctctggcccagacacagcttggaaaagctcatctccctctggggtttaaaaactcaaagcaaacggagcaagcctggcggccctggggatggggcagggcctctacctcactgtgatcttcgacctggcgacacaggacagccacacagaagcacgccaacacacttaaagctttgctccaactaaatcatttagtttcccttgaagaaataactgaaaaaaaaaacaactgctgacatctatgtctgtagctcgattttacagtctgctctttgtgagaaaggaaaatcactcgag

SEQ ID NO: 928 - DNA (cDNA), 426 bp; double-stranded, linear
gaattcggccaaagaggcctaatatttcacatttctcttttctaaaagtgtaaatttttcactttaaaatgaagcaagaattaaataaatagaacaaataccatatatcatcacagagtcaatatattatggtcctgttctgaccaagtgttgcattgtatttgtgttaccagaactgcagggctttctatggctacatggtcagtgcatgctcagacagctgttaaaatcaaaaccttcactgtgctgggtcacctggtaactactgtctatctcacaagtgcattctgctgacattcaagggttaaactggtttctagtaaatactgtgctttaaagtagtacatactgtgagctgtgttattagaaacctgcttgtccttgtgtctgaaaataaggaggaacactctcgcaccaaatctcgag

SEQ ID NO: 929 - DNA (cDNA), 325 bp; double-stranded, linear
gaattcggccaaagaggcctaggtaaatgttagtggaaaattttatgagtatatgctgaaaggagagattagttcacatgaactcaataatgttcaagataatgaaatgcttagaaaggttacttttgatccagaagtatttttcaacatattacttcctcctatcatattttatgcaggttatagcctgaaaaggagacatttttttcgaaatcttgggtctatcctagcatacgcttttcttggaacagcaatttcttgtttcgttattgggtcaataatgtatggctgtgtaacgctgatgaaggtaacgggacaactcgag

SEQ ID NO: 930 - DNA (cDNA), 406 bp; double-stranded, linear
gaattcggccaaagaggcctatggacaccctgtgccccaagccgatggccccacccagcagcatcagcacagntgccccccttctccgcagagcaggctctcctttacgggactctcctcttccctcccacctgatgcgcatcagcagccacgggcctggcccttgaatcttgtctaactgcactcgctgcctggtggcctcatcccaccccaagaccactgcactgatggctccaaccccaacttctccctgcactcagcttatgaatacgacggccctcattgcatccatgcagagacctcagaggcagctcagctcagtgctcagcgtggcactcggggcttcacacttccccccgtgtcctgtctgagaaaactgtgacaccatcaacccaactaactcgag

SEQ ID NO: 931 - DNA (cDNA), 246 bp; double-stranded, linear
gaattcggcctcatggcctaccagactgtaaacattccaggtcctgaaaaagtgttggaccagtctcctactgttatgttctccagttttaaaaatgtaaaatcagttgaaacactcgatcagaaggcagatgaagtccttgactgtcagagtaaccaaaacagaccagatgaatgcaaaagtgaaggtcagtcagccaaggagatgctaagtagtgaccagagagagactgtcaccggactcgag

SEQ ID NO: 932 - DNA (cDNA), 278 bp; double-stranded, linear
gaattcggccttcatggcctactccattgtcacgccaatttcccctagtccaagttttttctttgctgattcctttgtccatgtgtgctttgagcctctctcatcttgtctttcctcctttcctaggagcagctcctgaagcagcagcagcagcaccagtggcagcagcatcaacagggctctgcccctcctaccccagtgcccccatcaccaccacagcctgtgaccctgggggctgtgccagctccacaggctccacccccgccccacaactcgag

SEQ ID NO: 933 - DNA (cDNA), 421 bp; double-stranded, linear
gaattcggccttcatggcctacgagtgcgaccagccagatgagcgcccggtcctggtgaagagcattcactacctctacttctccatgatcctgtccacggtcaccctcatcactgtctccaccgtgagctggttcacagagccaccctccaaggagatggtcagccacctgacctggtttactcgtcacgaccccgtggtccagaaggaacaagcaccaccagcagctcccttgtctcttaccctctctcagaacgggatgccagaggccagcagcagcagcagcgtccagttcgagatggttcaagaaaacacgtctaaaacccacagctgtgacatgaccccaaagcagtccaaagtggtgaaggccatcctgtggctctgtggaatacaggagaagggcaaggaagagctcccggcc

SEQ ID NO: 934 - DNA (cDNA), 449 bp; double-stranded, linear
gaattcggccaaagaggcctaaaatagcaaagatggaacatggacctaaagcagtgactattgcaaattctccatcaaagccttcagaaaaggattctgtagtttcccttgagtcccagaagacacctgctgacccaaaactgaaaactctaagtcaaaccaaaaaaaacaaaggatctgatagctcactctctggtaacagtgatggcggagaagaattttgtgaagaggagaaggaatattttgatgatagcacagaagaaaggttttacaagcagtcttccatgtctgaagatagtgatagcggtgacgacttcttcattgggaaagtcagacggacacgaaagaaggaaagtagttgtcattcttcagttaaggaacaaaaaccactagaaaaagtgtttcttaaagaagatacaggtgaaactcatggggatacaactctcgag

SEQ ID NO: 935 - DNA (cDNA), 421 bp; double-stranded, linear
gaattcggccaaagaggcctaaaaatagtgattttttgactatctatagatattagttggcattctactgtaaggaaaactttcttttctcctgtacttattcatcgtcccccaggaatcagtcatttttccaaggagacctagttcctttttgtgaggagttgttttgagttcattttgaagttcatttgaagttttgagttcattttactataatctgcctaggtgtgattttctttttatttattctgcttaggatttgcagagatttttttgaacctgtggcttgatgtccatcacttttggaaatttctcagccagcatagtatctgcagactgtgtgtctgttccattttctctcttttctccttgtaggacttcattcacaaggatgttagaactttttaccatggctctcgag

SEQ ID NO: 936 - DNA (cDNA), 648 bp; double-stranded, linear
gaattcggccaaagaggcctacaggtctactggtaatgatttcctttaccttctaattatatagaaatgtcataatttctcctttattcttgaatgatagttttgtgggatatagacttgctggatatagaattactggatatagaattgccagatataaaattcttggttcaaagttttttttctttgaggactttgaatgtcatcccactgtcttctggcctccatagtttctcataataaatcagctgttaatcttcattaagtttcctctgtacacgaagagtcacttgtctcttgctgctttcaaatttttctcatttgctttgggttttcacactttaattatatgcctttctatgtggatctctttgagtttatcctgcttggagttcattgagctttttgcatctgtatattaatttctttcatcagatttggagatgtttttggcatttatttcctcaaagttctttctgcttctttctctccttctccttctgggtcaccacaatgcatatgttggtctacttgatgatgtctcacaggttccttagactctgtttacttttcttcatatttttttctttctgtttcttaaatttggataattttggttgtcttatattcaagtttgctgatctcgag

SEQ ID NO: 937 - DNA (cDNA), 160 bp; double-stranded, linear
gaattcggccaaagaggcctagaggatgggaagcttggggagagaagatactgaaatgctagaaactgagccagtagaggatgggaagcttggggagagaggacatgaggaaggatttctgaacaacagtggggagttcctctttaacaagcagctcgag

SEQ ID NO: 938 - DNA (cDNA), 399 bp; double-stranded, linear
gaattcggccaaagaggcctagaaaaactcaggaaagaaattgcagacttcgaacaacagaaagcaaaagaattagctcgaatagaagagtttaaaaaggaggagatgaggaagctacaaaaggaacgtaaagtttttgaaaagtatactacagctgcaagaacttttccagataaaaaggaacgtgaagaaatacagactttaaaacagcaaatagcagatttacgggaagatttgaaaagaaaggagaccaaatggtcaagtacacacagccgtctcagaagccagatacaaatgttagtcagagagaacacagacctccgggaagaaataaaagtgatggaaagattccgactggatgcctggaagagagcagaagccatagagagcagcctcgag

SEQ ID NO: 939 - DNA (cDNA), 519 bp; double-stranded, linear
gaattcgggcaaagaggctagaagcatcgaaagcgttggagaggtgttaccggtaacggcggcgagaagggtgttcccgaactagagtggggcatacataatcttgctgctatgcttcgaagctgtagtctgaatcaacctaagttttaaacagaaggtgaacctctgagatagaaaatcaagtatattttaaaagaagggatgtgggatcaaggaggacagccttggcagcagtggcccttgaaccagcaacaatggatgcagtcattccagcaccaacaggatccaagccagattgattgggctgcattggcccaagcttggattgcccaaagagaagcttcaggacagcaaagcatggtagaacaaccaccaggaatgatgccaaatggacaagatatgtctacaatggaatctggtccaaacaatcatgggaatttccaaggggattcaaacttcaacagaatgtggcaaccagaatggggaatgcatcagcaacccccacacccccccctcgag

SEQ ID NO: 940 - DNA (cDNA), 268 bp; double-stranded, linear
gaattcggccaaagaggcctaagaaattataccattttatggaatgtcaagctacatcacccgagaagaccagtacagcaagcctccgcacaaaaaactgaaagaccgccagatcgatcgccagaaccgcctcaacagccctccttcttctatctacaaaagcagctgcacaacagtatacaatggctatgggaagggccatagtggtggaagtggcggaggcggcagcggtagtggtcccggaattaagaaaacagaagcgctcgag

SEQ ID NO: 941 - DNA (cDNA), 535 bp; double-stranded, linear
gaattcggccaaagaggcctaagcctcgccttacacttaagtgcacccgatcctgcctctggcatctcacaaacgtcactccctggaacaaatttgtgaaggcctccagaccacagtgtcctcatctgtaaaatgggggtagtagtaatccttgcctcataaagttcttggcaaggattagatgagcgagcatgtgagtttggcctccgtttaaacactccataaagtttccttttaggataacagcaggccgttttagaaccttccagaggttacttattcagatatccttaggtgacgattgggaagctgccgtttcttgagagcctcctgggtgacagatggagagtggccctggcgtgacccttgaccctatccttgaggctttcctgcccgtctcctgcctcgaatgtgctccgcagcacatggatcaggatggggaaggggctgtgtcactggataccttcggcccctgcccacgtctagggcctgtgaaaacgaggagggacagcaaagaaatggggaaaggctcgag

SEQ ID NO: 942 - DNA (cDNA), 316 bp; double-stranded, linear
gaattcggccaaagaggcctaaaattgttaattctagtcaccctgcagtgctatagaacactggaacttattcctcctatatcaccgtatttttgtatctattaacaaacctctccatatcctccctccctcctacccttcccaacctttggtaatcactattctcctctctacttctatgagatcaatgtctttatttactcgaagtactcttaaaagtttaggacttaagtatttgaagaaattcacttgctttttgtttttattctactcaatactttttaatataaagatttacagtccccccttactcgag

SEQ ID NO: 943 - DNA (cDNA), 363 bp; double-stranded, linear
gaattcggccaaagaggcctacaaactcaagatgcccgagtggattggaggcgagagcgagctcaggaagtttctaaaacatcatttgcgaggaaagaactgtgaactcctgctggtggtaccagaagaggtagaggctcatcagagttggaggaccgatgtgtaacagttctgcccaacctccctctcgcctcagccccttcagtcctctgtgacgtgctgtggcctctacagtgggtctgcccttgccacttccccaaacatctcatcaagtttttccccttcagatctgacagtgcaataggacagacgtgtggactgttataagaactactcagtgttttgttcctgggcaaactcgag

SEQ ID NO: 944 - DNA (cDNA), 324 bp; double-stranded, linear
gaattcggccaaagaggcctactctgacagtgtttctgacctttagcatttctttttgattctttcttagaattctcatcttctgcttatatacctgtctattcttgcatgctgtctacgtttcccatgagagtccttagcacattaatcatggttgttttacattcacagtctggtaattccagcatccctgccacatctgaatctagttctgatgcttgccctgtctcttcaaactctgtttttttgccttataatcttttgttgaaagccgaacatgattcctgtactggctcttctggaggcttctgccctgttctcgag

SEQ ID NO: 945 - DNA (cDNA), 712 bp; double-stranded, linear
gaattcggccaaagaggcctacagatgacttcatttctcttggattccactttctcacgtgtcagaatgggagaggaagggaggtgttgggataagtttcagttccactgtttgtacttctcgtctggctaacacccatgtggcaaataggtttcatcatttgtttcagcttagatttgttgacagcggtttcctggagtgctgtcttgagaacgattctgaggaggctcagcaagaaagagtgtttcagttgattgggtgtgtctgtcatggagaaggaagtaaggagtgggcagtgctagcaaaattcccggggcacttctgtccattatctcaatacctggggttgacatttcctgtctcagatcaggagtcctgactaccctgcctctgaccactcgaactgagtgctgcttagctgtatcgtagacaccgcctgtttgtgaacagacaccctgcttcttgataacacaaaggccagcagggtccactgctgtgtggaatggccttcggtcatttctgcccagagcatagaggtcattttcactaataacataactctccttttgattgaaagtgttaaaatgttcctcctaaaagcacttattttttaggctcgttcttcagatttgccccatatcctaagcaaaatgccttcaatatgaagtggatattgcttgaccgtagggagcttgtccatactgtactcgag

SEQ ID NO: 946 - DNA (cDNA), 305 bp; double-stranded, linear
gaattcggccttcatggcctagtcttgaaggataagacttgcccaagtggataaggggcgaaaggcatcccaagaggagacagtaacgtgtgtataaatgaacgaaggcgtgaaataggatggagtgttttgaggaaccacaagtagccttctctgagtaagagcataggtttgtgaggaggacctagtgttgtttgaaaaaagagagtgatcaatggaagatgagatatcaagacaggagaaccaaggaagaaaaagcagaggacagctggaatgaatcaaaccgaagaaccaggatcctcgag

SEQ ID NO: 947 - DNA (cDNA), 321 bp; double-stranded, linear
gggttttgttaatggaaagtttaagtaaattatattgtaataaaaaggtagataaaccattgtacaacagtattctaggccgccaacaaaagtgtgacagacacactaaaagccctccaactttaacttgtaacgtagcttcattctcaaagctgactccttttttttctttttccttttcttgagtgtagtacagttaaaatttcaaacagctccttgacactgcttttcatgttcaaaccagccattttgttgtactttggtaaaggacctcttccccttcctcccctacacatacagatacacccaccataactcgag

SEQ ID NO: 948 - DNA (cDNA), 312 bp; double-stranded, linear
gaattcggccttcatggcctacaaaaggcaacaaacaagattaacatggaattataaaaatcactcaatccaaaataaggcagaagaagtggaaaagggagatgaagatcagatggaacaaagaatattactagaaatgactatgttttataatgcaaaatagttcagtacaggagaaagatacaataatttgagtgcatatgaacttaaaagagaatttcaaaatatatgaagcaaaaattgacagaacccaaaaggcaacaaacaagattaacatggaattataaaaatcactcaatccaatatctcgag

SEQ ID NO: 949 - DNA (cDNA), 291 bp; double-stranded, linear
gaattcggccttcatggcctataggccatgaaggccgggagcctcaagaaaaattagcagaggaaaataataggtagttactatttagggtaaactaaactgttctaaggaatagaaaataaaaattccatgtcttcaaaaataattcttccctctcaatctctctgaatatctcataagagtattcaggccacagaaataactaccatttagccactcagaggcttatagtagttctactaactttaacatttggcaaccaaaattactctaagaatcatcaccctcgag

SEQ ID NO: 950 - DNA (cDNA), 240 bp; double-stranded, linear
gaattcggccttcatggcctagatgggcattctgtttatcttactagtagtacgcagggtatgttgaaatctccaactgtgatggtggacctgtcaacttctccctgtggttttatcagtttttcctgggtattttgaggctattctgataggtacataaaatacaaaaattgctatatcctcctaattaacacttattatcaaattgttactaatgctttctgttcctaggccatgaag

SEQ ID NO: 951 - DNA (cDNA), 404 bp; double-stranded, linear
gaattcggccttcatgggctagatctgagctcactgcaacctctgcctccagggtgcaagccattctcctgcctcagcttcccaagtagctgagactacaggcgtgtgccaccacgttggctaatttttgtatttttagtagcttttttttttaaaccctgagtgtcaggtgtgaggtagtagaagaaaggtagtgttgttgacagcttgtgagtacttaactaattcttgttgcattcactataatatggtagttgtgtatacatttataggcaattaggaatagggaacagaatcagcagatactaacggagttagagatgtttgctgaagtcatggaaagccatcattacttttttcttccttcctcataaggccttagtgggtgtggcgttcagctcgag

SEQ ID NO: 952 - DNA (cDNA), 382 bp; double-stranded, linear
gaattggccttcatggcctagaaaaatcatgtgggaaaaccactgctgaaaatggatttaaattcagaacaggcggaacaactggaaagaatcaatgatgctctttcctgtgaatatgagtgccgccgacgaatgttaatgaaacgattagatgtgactgtacagtcctttggatggtctgatagagcaaaggtaaaaacagatgatatagcaagaatttatcagcctaagcgttatgctttgtcacccaagacaacgattacaatggcacatctacttgctgctcgtgaagatctatccaagatcattaggacaagtagtggcaccagccgggagaagaccgcatgtgccattaataaggtgctgatgggaagggctcgag

SEQ ID NO: 953 - DNA (cDNA), 268 bp; double-stranded, linear
gaattcggccttcatggcctagtccctcttccactgcatttcggcttcatacatgcacatgatgtcctcctccttgcactcagtgatgtctggcacgcggcggtactgccggtggtagtagtaatacctgttctttgcgtgctgccgctctataaattctctcacgagggtcacgggtcggtccacgatgaggtcgaacgctttcatcatgtagacgatgggattgggctgcaccggcgtgcggcgcgggggctcaggctcgctcgag

SEQ ID NO: 954 - DNA (cDNA), 260 bp; double-stranded, linear
gaattcggcttcatggcctaaagattctgctctttatacacagaactttgtatagagttctggaatgaggaagtgtgaggagggaatcagtgcctctcggaagtcgttttaattagaatgtgatttttttttcttaaacgtgtcttcattggctcccagatttgccgtagaaaccaagcaaactgggtgctaaaacagaaaggcccatagattgtactttttgagctgtttgaatttgtataccatatgcacaactcgag

SEQ ID NO: 955 - DNA (cDNA), 129 bp; double-stranded, linear
gaattcggccttcatggcctaatccgagtgtttcgcgcacgtcctaagctgacagtccctctggacagagtccctggagtggagtcactgctccttgtctttttttcataacatacactcacccgtatg

SEQ ID NO: 956 - DNA (cDNA), 404 bp; double-stranded, linear
ggctaaacatggaaatgaaagactgatacttgctaccacaaaaananacttaagcacatagatcatagacagtataaagcaattagacaatgaagtctacaaaacaaccagttaacaacacaatgagagtatcaaaatcttacatgtcaatactaaccatgaatataaatgatctaagccccccacttaaaaagcatagagtggcaaactggataaagagataagacccaactgtctgctgcctttgagagacccatcttgcatgtagtgacacccacaagctgaaagtaatgagatggagaaagatctatcatgcaaaaggaaaacaaaaaagagcaagtatcactattcttatatcagataagacagattttaaaccaacaactatcaagaagaacctcgag

SEQ ID NO: 957 - DNA (cDNA), 283 bp; double-stranded, linear
gaattcggccttcatggcctagactctctttatacaattcatcaaggttaaacaaaacataaaattcccttaaaaatagggtaataaaatagatgaaatttgtatcactcaatttggtgatactagtaaaaactatagttcatatttatatacaaataatacagtctgtaaaaacagtcttagaatttaaataagctatctaaacgtgttaaaattttaaatcaggacctgatttgttttgctttccattaaatgtcacattgaattctagacctgcctcgag

SEQ ID NO: 958 - DNA (cDNA), 309 bp; double-stranded, linear
ctcgaggacctggtcgtgaccaactataagatgggggggcgacattgccaatggggtacttcggtccttggtggacgcatctagctcaggtgtgtcagtactgagcctgtgtgagaaaggtgatgccgtgattatgcaagaaacagggaaaatcttcaagaaagaaaaagagatgaagaaacgtattgcttttcccaccagcattttggtaaataactgtgtatgtcacttctcccctttgaagagagaccaggattatattctcaaggaaggtgacttggtaaaaattaggcctctttggccgaattc

SEQ ID NO: 959 - DNA (cDNA), 149 bp; double-stranded, linear
gaattcggccaaagaggcctagattgaattctagacctgcctcggactactgcaagtgcttaaaggcattatttcatagaccttacaactacccatataacattattatcttcattttacaaatgaggataataatgttatatctcgag

SEQ ID NO: 960 - DNA (cDNA), 455 bp; double-stranded, linear
gaattcggccaaagaggcctacaccgtaatactataatactatataatctgtttgttaattttctgagaataataactcaatggagtaactctttaataggcatcttttccttataaaaaatattgtagattggctctctgcaagctaatttcttttatatggttaatattttagtgtacattaagagcttagagttctttttgtaatcaagcttgctacagaagctgtgctttatttatttcatagtaatttcctctagtgggtcattgtataaaccctgatcatttttgtatgtctattccttttcttgcgaagtgggcagcttgtttagccatggtgttttggcttcaatagtgaggtctctatttgggaatctctgaatttcacaggaatgagtagaactatatttaacaatgaaaaaaatagtattagattttagggcagctggctcgag

SEQ ID NO: 961 - DNA (cDNA), 207 bp; double-stranded, linear
gaattcggccaaagaggcctaccctgtctttatgctccaatgcttctttctccagatatgaaaggagatgctctctatcaaatggccctgtggtggactttgatgtctggttcttctgccggaaccctgctggctttttgctgtagctccacattcctgtgcattgaggggttaacattaggctgggaagatgacaaaactctcgag

SEQ ID NO: 962 - DNA (cDNA), 247 bp; double-stranded, linear
gaattcggccaaagaggcctactgtagtatttaaatatctgttacaggtttccaaggtggacttgaacagatggccttatattaccaaaacttttatattctagttgtttttgtactttttttgcatacaagccgaacgtttgtgcttcccgtgcatgcagtcaaagactcagcacaggttttagaggaaatagtcaaacatgaactaggaagccaggtgagtctcctttctccagtggatctcgag

SEQ ID NO: 963 - DNA (cDNA), 472 bp; double-stranded, linear
gaattcggccaaagaggcctacaagaacatgaaacatctgtggttcttccttctcctggtggcagctcccagatgggtcctgtcccaggtgcagctgcaggagtcgggcccaggactggtgaagccttcggagaccctgtccctcacctgcgctgtctctggtggctccatgaatagtcactactggagctgggtccggcagcccccagggaagggactggagtggattggatatatctctgacagggggagcaccaactacaacccctccctcaggagtcaactcaccatatcactagaaacgtccaagaaccagttctccctgaatttgttctccgtgaccgctgcggacaccgccgtatattactgttctcgtgggacatccccccccccctcctactactactccatggacgtctggggcaaggggaccacggtcaccgtctcctcagggagtgcatccaccctcgag

SEQ ID NO: 964 - DNA (cDNA), 303 bp; double-stranded, linear
gctcggctcgctgcaacctctgcctcccaggttcgagcgatcttcctgcctcggtctcccaggtagctgggactactggcgtgcgcgaccacgcccagctaattttttgtatttttagtggagacggggtttcaccatgttggccaggatggtctcaatctcttgaccgcgtgatctgcctgcctcggcctcccaaagtgctgggattacaggcttgagccaccgcatccagccaacatttttcaaatagaaaatctgaagctaaaatcacccctaaaggacaaataacaggactatctcgag

SEQ ID NO: 965 - DNA (cDNA), 281 bp; double-stranded, linear
gaattcggccttcatggcctactagattatggatttttttatttcaatggaagtgaagttcaaagatgccagagtggtacagttcgaacaaactgcttggattgtcttgatagaacaaatagtgtgcaggcatttcttggcttagagatgctagctaaacagttggaagctcttggtttagctgaaaagcctcagttggtgactcgctttcaagaagtttttcggtcaatgtggtccgtgaatggtgattcaatcagtaagatatatgcaggaaactcgag

SEQ ID NO: 966 - DNA (cDNA), 454 bp; double-stranded, linear
gaattcggccttcatggcctagacgtgatgtgttgagagaagaatgttctaggcagaggcaacagcagatgcaaaggtctgaaggggagacagaccgagctagaaaagcatggcacatcagtgatctaagttcgtgtggtttcctaaggttggaacctagggtgcaaactgaggatgggcagatgaggtggaagaggaagagcagacccaggtcacaaagatcttttgtgctaaggatttttaagcaggtaggaggagagagaatatgagccttgggatttgaactgctgtgggtgtacagaaaaagagaaactcaacgagaggtttaggtttagggacgtggtaggcttttgcagtaagggacaaggacagaaggctcatctgaggatgggagggacactttagaggcaaatccataggatgcagtggctgaacagaaaaggtgaatctcgag

SEQ ID NO: 967 - DNA (cDNA), 322 bp; double-stranded, linear
gaattcggccttcatggcctagtcatttaatttaacttagcaaaactccaatagtgtaagttaacagattttggaaactggttttaagtagatgtattataacataaaacaaagctagccattatcaagttatttccttgttagctatttttacagcatgtgcatgttaggtagtcatcgtgaaagcaagaatcttaagttaaatacatgttttttttgtttgtttgttttactgctgtgctgtataatacatgatgctgttagcagcggaacgtatcagagacacggcaccaaagtatgttactgtcggcgaaaactcgag

SEQ ID NO: 968 - DNA (cDNA), 478 bp; double-stranded, linear
gaattcggccttcatggcctagactgctggcatatccaccccacctgtgctgctgcccccgccaatccatcagggcagctccgactcctgcagcacccaccgcccaggacgtcagctactcaggttttctggctgctggggttccgcacgaatgggcccttcttttgggaaaatgccagggaaggggaacggctgggctcgggcgccacagcttgtccctccagccagcaggcacagatgtatggcgcaggagggacaactggcccctgtggccagccccagagagacgggccctttctttgggaccctggcctcagaggcctgcgtgtcacagctcagggtctggctgggcaggggcaaaacctgccttatttgccagatgtcccagaagtacacaggagcagacgcaccacttcgatggctattttaggaggctggtgacaagcaaggcatggtggcaggaagccaggccctcgag

SEQ ID NO: 969 - DNA (cDNA), 484 bp; double-stranded, linear
ctcgaggtccctgtcctgctcagtttctcttcaatgtggaagtcctgggaggtcagtctcatgagaataaggtgctgtactttcacagccttctcagacttttctgaggatggccttacacttgccagctagtggagtgagcagaactcctcctggtttctgtggctgttctcagaatgccctagttcactttccagtaatacttttttgggaacattttgtgtttctcattttctcaggtcccccaggcacaccatctttcctctgcttcctctcacacaggtgctgatactgtgtaggtttggggctgttgttctggcccactccctgatattttctgggtttgtcacctagttttcttaaaagtatcatctacatggttttggtttcactatctattctgtctttatttgaacactaggggaaattcattatgccaatctcacacattgtgtgattccattaggccatgaaggccgaattc

SEQ ID NO: 970 - DNA (cDNA), 540 bp; double-stranded, linear
gaattcggccaaagaggcctaggcaaaatgaaaatacttgtggcatttctggtggtgctgaccatctttgggatacaatctcatggatacgaggtttttaacatcatcagcccaagcaacaatggtggcaatgttcaggagacagtgacaattgataatgaaaaaaataccgccatcattaacatccatgcaggatcatgctcttctaccacaatttttgactataaacatggctacattgcatccagggtgctctcccgaagagcctgctttatcctgaagatggaccatcagaacatccctcctctgaacaatctccaatggtacatctatgagaaacaggctctggacaacatgttctccagcaaatacacctgggtcaagtacaaccctctggagtctctgatcaaagacgtggattggttcctgcttgggtcacccattgagaaactctgcaaacatatccctttgtataagggggaagtggttgaaaacacacataatgtcggtgctggaggctgtgcaaaggctgcactcgag

SEQ ID NO: 971 - DNA (cDNA), 289 bp; double-stranded, linear
gaattcggccttcatggcctagccagtctcagcacttaaacaaccaggtgttgaaggactatgttccaaagaacagaagagagtatggtttgcagatggtatattgcccaatggtgaagttgcagatacaacaaaattatcatctggaagtaaaagatgttctgaagactttagtcctctctcacctgatgtgcctatggtaaggaattcaaagaatacttaattgactaaacaaaattttatttcgtagataattcctggtgtgattattagagtgctttttctcgag

SEQ ID NO: 972 - DNA (cDNA), 418 bp; double-stranded, linear
gaattcggccttcatggcctagagcttgggaggttgaggctgcagtgagctatgagctgcaccactgtactccagcctgggtgacagggcaagactctgtctcaaaaaacaaaaacaacaacaaaaactttattcctaaaaagtgctgacccagagataagaagcaagcacatggttggtaaaatgacatcagtgagcttgctttatgcagggttgccccaaaccttcaatttgtaaaactcaaaatatctggaaagcttggtgaggcgaggcgggactgtaactcagcactcaccgcagggtgagacccttagggcagcgggtgctacactgaacaaagcggtgaacagccccctcgtgagagggggttcttggcagatgacgccagcagctgacaaacaggcaagtgcaactcgag

SEQ ID NO: 973 - DNA (cDNA), 276 bp; double-stranded, linear
gaattcggccttcatggcctagatttgtaaaagattttcctagatttactgtgttctggatctagcttgaacgtgaatgtttgtatagtacgttttcttaatattttttagtattcatagtatataatcatactaaacttgagaaactggaagaatcaagtcttcctcagttctgtttagactttctagttttttttaaggatacttccatatcttctgtaagctacacagtgagcttcatttttgcacagttataatacactctcgaatctcgag

SEQ ID NO: 974 - DNA (cDNA), 379 bp; double-stranded, linear
gaattcggccttcatggcctagggttcgatgataagcacaggcggcagctggattgcaagtggagtggtaatggccagaacagcctctttctgttttgcatttagtcgaggatccaactgttcatcccattgtctgttaggactccatggtatggtgggagtcatactgatgtctggaaacaaaaccccattgtccttgatcctgtctagtgcatagtgcatttcacagaggggtaatcgatttaattgaaactgaagttcaacctgtgtgtcacagtcaggccgaagattaagttcttcacagcattccctagatagccttaaaaatatatattcctttgttttttcttcaatagtagcttcctagacctgcctcgag

SEQ ID NO: 975 - DNA (cDNA), 417 bp; double-stranded, linear
gaattcggccttcatggcctaagagaaagagagtgagagagagagagaaagagagagagagatgctgttgaatcagaaacagatcaacagcccaaagattttcctgtccctggagtgccagccccaggaagctccagggctgagtggtcaggagccagtttctccagcccctcctccccacaacccctagtggggaggggcagctgtccatttgcccaaagtattaatgcaactgaagctgtgatatttccaacgactgtaggaggaaaaattaaggggagagaggaaaacaaaaccaaccaacccctaaaatcattttcttattgtacataacgacctcattctcctgtatatgcggaagatataaccttatatttggtaagtgtttcttgtgctattttatcacgcgacctcgag

SEQ ID NO: 976 - DNA (cDNA), 154 bp; double-stranded, linear
gaattcggccttcatggcctacacagaaaaatttcaacaataaaagttcttaattatgggaaatagttacatgtgtgttatatcatttatggctcattttgtatttttatttaaaagtattaaaatcccaacagtaacagcaatacaactcgag

SEQ ID NO: 977 - DNA (cDNA), 252 bp; double-stranded, linear
gaattcggccttcatggcctaaattgttctttgctcaaataaactgttaaatttatcttggcagactctattttgatccccaaatttgatttagatttggggccattaaatttcactatttaataataaccctactggatgagaataagtgtttctcaatttctggtgatatggtttggctgtgtccccacccagaatctcatcttgaattatattccccataatccccacgtgtcaacggcaggactcgag

SEQ ID NO: 978 - DNA (cDNA), 251 bp; double-stranded, linear
gaattcggccttcatagcctagtttagttctcagaattcttcatatattttggcagcagtttttccatcagattattttgtaaatattttctcccagtctgtgacttgctttttccattctcttaacagtgtctttcacacaacagaagtttttaattttaatgaggctcaacttaatttttttttcattagtagattgtgcttttggttttgtatctaagaagccatcattgaacccaggatcgctcgag

SEQ ID NO: 979 - DNA (cDNA), 534 bp; double-stranded, linear
gaattcggccttcatggcctagaaggcttctgaataatttctcaaaactanctttccatttnagtacacgatttgataaacatagcacattagataggtatttagcaatttcttctaccaactacactttgccctcactaagggttagagtatgatttgaaacaatttctacatataaagcatctttaaataagttttgtgttcactgaactgagacttctttcacttatgtacctatggaagttaatctgagcatacacatatatacatacttgcatacatatgtgtacatatgttttttaagtaagtnacttttaccattagaataaacctagacactacagggacaactctggggaacagggcggtctgccttaacaacccttctctaggttgaggaaggcaggtatagttcactgaaggatgtgatgaggctgtagtaagtcttctcatcatctgttaatcctgcgttgcctggtctcaccaccacagctacgtgcacatctgcttcctcagcagcactggcctctcgag

SEQ ID NO: 980 - DNA (cDNA), 223 bp; double-stranded, linear
gctcgagtgtcgtgctatctctaaattgtgatcactaagaaccgctgcggaaacagtaactgtttcttttatttttgacattttagtttgtaatttatccaattctttcttcttttgataagtctccattctctttacttcacgggtattttcaaattcattaatcattttatcacagtgccacttgttagaccctaatgaacgatgtcaccctcttatcaaa

SEQ ID NO: 981 - DNA (cDNA), 481 bp; double-stranded, linear
gaattcggccttcatggcctaattacttgacccgtaatagggttgtggccgttttctgatgcctaagtattatacagagcccacaatggccagtttactaccagaaagggcttcagtaagatattcttggacttgatactttcttcagatcctctttgtgccaagataatttatccagtcattgggaatagtaagtttctgtgtaacccatctcaattatagaagcaagttcagctttatgtatttgtatggggagttgaagattcagatagaggtattaagatgtgtggcatttacttaaaccatcacatttttttctttctacgcccccttgcctgtaaaacacctgggaagttccactggtgtcatccatcctgatgcttcagaccaccctcccttcttcacagaccgtgtcactttgcctgtgggtgggggctagccagccaccaccctcttttctgtgctgccagccaatctcgag

SEQ ID NO: 982 - DNA (cDNA), 293 bp; double-stranded, linear
tccgtgtcccctcctccctctgcccccagtgtttcttctgatttttttttcccctttccctccctccctctccgcattcttcccttggttcagcacaggtaaaacggttcccctccctccctgccttcatggatcaccagctcacgtcatgttgccttctcttttctttgtgtgtgtgtttatttaagttatttttcttcctcctctcccttttctttttggccctccctccctccctcttctgccatgtaactggaggatgtgctatgagtttgcaaacagccggactcgag

SEQ ID NO: 983 - DNA (cDNA), 334 bp; double-stranded, linear
ggtgaggatggtggctgtggttgtgttggtggctgtgatggtgaaggtggctgtggtggggatggtgactctgatgctaatgttggttgtggtgatggaggcagctgtggcaaggatggtgactttggtggagaaggtggccatgttggggctagtggctgtggttgtggtgatggccatggtgaggatggtgttaaaggtggctgtgatgaagatggtgactggggtagaaatggtgactgtgatggtaatgttggctgtggtgatgaagggtagttatggtgaggatgatgactatggtggtgaaggggccatagtggcaacggcactcgag

SEQ ID NO: 984 - DNA (cDNA), 631 bp; double-stranded, linear
gaattcggccttcatggcctagggaaagagtaggggtggaggggtaggaggatttactcttccagcgagagctacgcgcatcccatcctccccctcccccctacccgggctccggcntggaggcggggcgtggccggcctgctttgggaggggaggggcttcccttacagtgctgggctctgccaggacggctgtggggtcgccttacctcggggtatccactctgcagtcgaccagttcccgccaggagcaaagggtaggaaggagagcaggatctgctgtaggaacgcagctaccgcgccactatcacgaagaaacagcaggctcggggcacgagacgaactggagaccgcgctgcctagctgggtaacctgggaagcagagggtaataagtggcgccttaagataaccctgtagcagcagcagtggcggccaaaggaggctgctcagggaacaagcggctgtagtagtctgtggggcgactggagtgaccgaagccaaggcagtttagtgcctctcgtgttcttattttttaacctctgactatgcaattctgaaacctcccccattcgggggaccagacagcctgatagacaccttccactctccttcctcccgccgtggtctcgag

SEQ ID NO: 985 - DNA (cDNA), 324 bp; double-stranded, linear
gaattcggccaaagaggcctactgcctcggtttctacctttgccaaatgagttgatagattatcgctttttttccagctgtcatactctaggagtctgaattgtaaaatcaaagaagcatttcccagaaaagtttttgtcaaaaatttgatttacataacctcagaaatgtgtattgctttaaaaattataaagttcatggagcataccaagcagcctgtataccatttctaaaccaactactcccctgcaagatagatctcttttttatagacagaaaataaattcaaagaggtttgttacttgcccaaggccaccactcgag

SEQ ID NO: 986 - DNA (cDNA), 239 bp; double-stranded, linear
gaattcggctttcatggcctaaaatgtttttcaattaaagacttaaatattacacttttaaaactttttattatggaaatctaaaaaaaattcaccaaatgagagagaacattacaatgaaccaccacatacccatcacccattttcaacaattatcaacacatggcctatcttgtttcctccataccttcagacaccctccgtccacaaactgggttattctgaagcaagccttcgag

SEQ ID NO: 987 - DNA (cDNA), 695 bp; double-stranded, linear
aaaagttcagggactttgcaccctgtggggtactcagatgtccagccgcactctctacattaatagtaggcaactggtgtccctgcagtggggccaccaggaagttccggccaactttaactttgctagtgatgtgtnggatcactgggctgacatggagaagctggcaagngactccnaagcccacccctgtggtgggtgaatgggaaagggaaagaattaatgtggaatttcagagaactgagtgaaaacagccagcangcagccaacttcctctcgggagcctgtggcttgcagcgtggggatcgtgtggcagtgatgctgcccngaangcctgagtggtggctggngatcctgggctgcattcgagcaggtctcatctttatgcctggaaccatccagatgaaatccacagacatactgtataggttgcagatgtctaaggccaaggctattgttgctggggatgaagtcatccaagaagtggacacagtggcatctgaatgtccttctctgagaattaagctactggtgtctgagaaaagctgcgatgggtggctgaacttcaagaaactactaaatgaggcatccaccactcatcactgtgtggagactggaagccaggaagcatctgccatctacttcactagtgggaccagtggtcttcccaagatggcagaacattcctactcgag

SEQ ID NO: 988 - DNA (cDNA), 314 bp; double-stranded, linear
gaattcggccttcatggcctactcagaacaatcactgcatatcccatcttaaaggcaaaacccaaaccagaaaaaccccactcaggtcttgctgacccaacactacagtcactgtatttgagacccctttttcttgaaaaagggacttcacttttttgagcagcattctatggttctttccacacagcaattgacgcatctcacggcactgctctctgctgggcagagagcaaacacagacagccaccatccccatattcgtagtaagagaaactccagaaacgcagccaccgtccccctagacctgcctcgag

SEQ ID NO: 989 - DNA (cDNA), 687 bp; double-stranded, linear
gaattcggccaaagaggcctaggagctcccccatggatcatggcgttaatgtttacaggacatttactattcttagcattattgatgtttgctttctctacttttgaggaatctgtgagcaattattccgaatgggcagttttcacagatgatatagatcagtttaaaacacagaaagtgcaagatttcagacccaaccaaaagctgaagaaaagtatgcttcatccaagtttatattttgatgctggagaaatccaagcaatgagacaaaagtctcgtgcaagccatttgcatctttttagagctatcagaagtgcagtgacagttatgctgtccaacccaacatactacctacctccaccaaagcatgctgattttgctgccaagtggaatgaaatttatggtaacaatctgcctcctttagcattgtactgtttgttatgcccagaagacaaagttgcctttgaatttgtcttggaatatatggacaggatggttggctacaaagactggctagtagagaatgcaccaggagatgaggttccaattggccattccttaacaggttttgccactgcctttgactttttatataacttattagataatcatcgaagacaaaaatacctggaaaaaatatgggttattactgaggaaatgtacgagtattccatggtccgtctcgag

SEQ ID NO: 990 - DNA (cDNA), 677 bp; double-stranded, linear
gaattcggccaaagaaggcctagagcccttctgtcccttctaccatgtgtggatgcagtgagaaggcaccgtatctctgaagcagagagcccgccctggacactggatctgctggcaccttgatcttggacttcccagcctctagaactgtgagaaataattttttgttgtttacaaattacccaggctaaggtgtttcattgtaacctgaatggaccaagctggtgtgaccctgttggaaaactggcagtatctaccaaaagccgaacatacgtataaactgatccagcagttccactcctgggtatgtacaccacagaaagctatgtccaccgagacattggcaagaatgtttctaaccacacgctgactgtagccccaaacctgaaacaacccaaatgtccatccaccaacccaaatgtccatccacagttgaagctacagtgaagtcacagggtcgaatactactgcacagcaacgaatatgaatgaaaatatcgctatgcacagcaacatggataaatttcacagacatgaggtcaagcaaaagaggtcagagtcctcatcatcaagagagaattcattgtatgattctcttcctacaaaaagtacagaaataagcaaaactgatccatggtgttagaagccaggggaacagttaacaagggagcactcgag

SEQ ID NO: 991 - DNA (cDNA), 445 bp; double-stranded, linear
gaattcggccaaagaggcctaagaagctgcttcctcctgggaacaaccgcctcccgctcctagcaggttgctactgccccgaacccgcgctgcagggaacagcggggcaaacaaaaccaatagagccatggcgactccctctgctgccttcgaggcccttatgaatggtgtgacaagctgggatgtacccgaagatgctgttccatgtgaactgcttcttattggagaggcttcatttcctgtgatggtgaatgacatgggccaggtcctcattgctgcctcctcctatggccgtggccgcctggtggtcgtgtcccatgaggactacttggtggaagcccagctcacgccctttctcctgaacgcagtggggtggctttgctcttcccctggggctcccattggtgtacacccatccctggcacctttggccaaaatcctcgag

SEQ ID NO: 992 - DNA (cDNA), 392 bp; double-stranded, linear
gaattcggccttcatggcctactgtgatttaaaatcttgctgtgtggcttgggttgtttgtgttggttccaaaccctgaatcttttggggtcttcaatttgtgggcatgtcagtggaaattctaagctttgtttaatggtgtgtgtgtgtctgtctgtctctgtgtgagtgtgtttagaaattggcttctctgggttcctcgctcgtcttctggaaggtggggttatagacatgctggtgaattctgaatgttttataaattagactattaacggagttaaattgaagaaaccttctgtcataagaccttccaggaattccattccaaatgaggaaatgcataaagacttgtccacttggcaaacattgggtgtttgggaggtggactcgag

SEQ ID NO: 993 - DNA (cDNA), 359 bp; double-stranded, linear
gaattcggccttcatggcctaggcggctcccttggtcctggtgctggtggtggctgtgacagtgcgggcggccttgttccgctccagtctggccgagttcatttccgagcgggtggaggtggtgtccccactgagctcttggaagagagtggttgaaggcctttcactgttggacttgggagtatctccgtattctggagcagtatttcatgaaactccattaataatatacctctttcatttcctaattgactatgctgaattggtgtttatgataactgatgcactcactgctattgccctgtattttgcaatccaggacttcaataaagttgtgtttaaaaagcagaaacctcgag

SEQ ID NO: 994 - DNA (cDNA), 115 bp; double-stranded, linear
gaattcggccaaagaggcctagactgtcagctgtgagtggccagtacaacaaatgctttggctttcagttgtcattctgatgtcttgcaacatatcatcgtgtttgattctcgag

SEQ ID NO: 995 - DNA (cDNA), 633 bp; double-stranded, linear
gaattcggccaaagaggcctagtggagacaaaagcatgtgatcccaatttgctgggatatcctctcctgcatttcaaacaccttcactcagtgtcagccacagcggccaccacatagcagctggccccgcaccttctctggaacagtctggagatgcaaggtcagggtggaaggcctggttcacccttgaaagaaaggatggctaggggtaaacaagacgagcaactccctggaatgcagggagccaagaagggcagccgaggataaggctctgcctccccaacggcgagggtttcctttccttctggtcattanaactgcacagcccccggggagatgttgaacatggcagggtcgaatcgctggcctcggaagggagaacttcagcatcccacccttcttcagcatctcatggactttcagctcatggctctgtggcttgccctgcagcttctggtggtagtcaaaggtaagcctgtccaacaccgcctgttcctcctcatccacggtggccatggagcgctccttgttgatcttgtcaatgtcgatgggctcttctccctccaggatggcgttccaccaatactcgcccaccttgctcaggttcaccaaaacgcacttcccgggctcgag

SEQ ID NO: 996 - DNA (cDNA), 462 bp; double-stranded, linear
gaattcggccaaagaggcctagttgattctcagttcatggtggagtcattcaagtttatttctggcatcttggcagccctgagtgccatgatctctctagaaattccgcaagtcaacatcatgacaaaaatggatctgctgagtaaaaaagcaaaaaaggaaattgagaaatttttagatccagacatgtattctttattagaagattctacaagtgacttaagaagcaaaaaattcaagaaactgactaaagctatatgtggactgattgatgactacagcatggttcgatttttaccttacgatcagtcagatgaagaaagcatgaacattgtattgcagcatattgattttgccattcaatatggagaagacctagaatttaaagaaccaaaggaacgtgaagatgagtcttcctctatgtttgacgaatattttcaagaatgccaggatgtactcgag

SEQ ID NO: 997 - DNA (cDNA), 548 bp; double-stranded, linear
gaattcggccaaagaggcctagctggtaacacatgtgaactcaggtaaagtcatcgagcattttactgactctattcctcaataaagtactgggaaaaaactcataagaatgacaaaaacaacatactcaggtatgcgagcagaagcctctgacacagcttgtcttcggggcttaactaaatgatctattttaatgagggaatccgtggaaaggcatgcgttttcaggctcattttctgcttcgatgctttgtccagagagttggaatctcaacgtgtgtttcatgtgaggctccttaagagggtgacattcaacatcccaaaactgggcataatcccccctacctctgggcaaaaatgtgatggagactttttggatcccatggctttccagcagaccagaaataggagaacatctgaatgctgcataggtagctctaaaaacatctccactttcatcaactcccttgacataaggtggcaccacagacgtgaaatggcatctgtcatctttagcgccaccttatgtcaagggagttgattctcgag

SEQ ID NO: 998 - DNA (cDNA), 572 bp; double-stranded, linear
gaattcggccaaagaggcctagtttccctttctgtattttactactaaattagaaagcactggttatgtaataagttactacattgctttggttgagtaaaaacaagagtatatatttttcttgtttcttatttnctaaacccttaactcctgctgaggtcataacaacctcagtctaagctctgtgtccatcatactgttaacttaaacaaatgggtggtgggggtgggaagggtaatacagtcctgccattgcctaccagtaggagagtccaaacagaacactcttttgagtagcaattatttaatttgcccagtcaaggcaccgtgtttatatactatttcacattgaatttgattatgccctacagacctggctggtcaaggatttgatatacacatattggcttgggattcgagctttcttttttatttaaataaaaatttatatatatattatatatatacatatatacatagctatatctgtatatatattgggtatgttttaaggattttttcgcatgagcgcagctgttgcgataaattgaccgattgggaggtattctcgag

SEQ ID NO: 999 - DNA (cDNA), 629 bp; double-stranded, linear
gaattcggccaaagaggcctagaggggagcacgtcttttccttgagtgtaattcactaatgactgtggttccaaggaggtgcgacctttaaagggaattggcccttctttgaaggcaggtgagaatctagtctcagtgacaacccagcctgatttggaaggggggagtcataagggttttcgcccagcacaccagggttgcagcctgcgcaagaccttccatagctatttctgccggcttgcttccttcccttcccagccacgatgaggcagctgagggttgccacggaaaccggctctgtcctcccactggaggctgccagctctgatttcctgcagagttaagaaggaggcggcagtgggggtcacccaggcgtgaagatgggtttccctggggatatcctgcctcctgccaatcacagcgtctctctgggaatcctgggggtgcctggaggctgaggcccagggaagcccccaaaccccagtgctgctctgagaagagactagcctctgggacattcagaggtctggggttcttttatctccctccagctaaagctagagggacctcattatgtgtcttacaagatgtaccctaaaccgtcgattgaattctagacccgcctcgag

SEQ ID NO: 1000 - DNA (cDNA), 568 bp; double-stranded, linear
gaattcggccaaagaggcctacctgtatgctattaacactcaccacagcagagagctgaggattgtggttgcaattcggaataaactgcttctgatcacaagaaaacacaacaagccaagcggggtcaccagcacctcattgttatctcccctgtctgagtcacctgttgaagaattccagtacatcagggagatctgtctgtctgactctcccatggtgangaccttagtggatgggccagctgaagagagtgacaatctcatctgtgtggcttatcgacaccaatttgatgtggtgaatgagagcacaggagaagccttcaggctgcaccacgtggaggccaacagggttaattttgttgcagctattgatgtgtacgaagatggagaagctggtttgctgttgtgttacaactacagttgcatctataaaaaggtttgcccctttaatggtggctcttttttggttcaaccttctgcgtcagatttccagttctgttggaaccaggctccctatgcaattgtctgtgctttcccgtatctcctggccttcaccaccgaactcgag

SEQ ID NO: 1001 - DNA (cDNA), 543 bp; double-stranded, linear
gaattcggccaaagaggcctagtaatacttaaagtgcaattgttccaaggcttttgtttccatcatcacaaatattataaagaaagagctatgtttagggtgaagaagatatggcacaagtaatatgtaaagaacttatgactttcgcatcctctagcaaacagtaagctgcctgtacagctgcacacagacggactttacacaacaaactctggaacttcatcatgagtgagatccagagaaaagtatttgctggttcttttgactggaaaagcatcttggatgttgatgcactgctgggccaagcaactgttgcaatagaggccttcctcatccagttcatggccacatccaaaggtgtaactctgagcagtgtcctgacacagacctgcaatgcgcaggaagtctttctggtaaagtctgatgtcatcgaggctcaagctgtgtcgatcagtggaggtctttggtttccgacatatagtctgtggaagagaatcagtactctggccacgaagcttaacaactgtttctgaagagctcgag

SEQ ID NO: 1002 - DNA (cDNA), 592 bp; double-stranded, linear
gaattcggccaaagaggcctaattccacttacgaattaacactgtgtacatggcacctttgggcccatcttgccttgaaagtccctgttggatggaacagtggcattttccttccttttctcaggactgcaaacagacctaatatttggccttgcccttgcctgggaagctgctgctgagtcttgtctcagccgggctgtgcattccgagcggctgccctgccctgcgctcagcagctggaatcaatctgcccacctccttaagaagccacttcatcagcggtcacccggcagctgctcgcctcccagggctgccgggctagggctttatcgcatttttgaaatttcagatttctgtgtctgggctatgcccctcgaacagtaacagcaccgctttgcagcagggaggagatttcaccaggatatggaggggacaggagaaaagccctccttcccagagtccactgtcattcaggatttgctctcaaagaggcaagaaatctctaagaatgaaaggaggtgttttgttgttgttgttgttttttgtatgtactgggaggaaatggctaatcttgggtatgcacacgctcgag

SEQ ID NO: 1003 - DNA (cDNA), 584 bp; double-stranded, linear
gaattcggccaaagaggcctaggctccgtctgttggggggcgaacacgccgcggtcctcgtcgtgtgaagtaagaactctgctagagaggaaatggctgcttcatcatcatcctcctcagctggtggggtcagtggaagttctgtcactggatctggtttcagtgtctcagaccttgccccaccacggaaagcccttttcacctaccccaaaggagctggagagatgttagaagatggctctgagagatcntctgcgaatctgtttttagctatcaagtggcatccacgcttaaacaggtgaaacatgatcagcaagttgctcggatggaaaaactagctggtttggtagaagagctggaggctgacgagtggcggtttaagcccatcgagcagctgctgggattcaccccctcttcaggttgatactgcctggatggtcacctctggtgcgcagcaagtgcaaagccagtgggggactttctcacagcttacatagccatccagagatccacagctacgtcactgaattgttaatgcacatttgtacttggtttctctgtatctattcacaggcgaactcgag

SEQ ID NO: 1004 - DNA (cDNA), 440 bp; double-stranded, linear
gaattcggccttcatggcctactttctcattccctaagtcattagaaagcaccagttctaactccaaatgatgacatggtcttattttatctattaaccataagcttacagattctagtgaagaaaaaactttaggaggctacatggtctattggagagtgtaggctctgcagtcagaagatccctacccaggcttctgtctttctcagtaagacttgggaccacagcaaggtccgcaatctcctgaggctctgttttctatggttgggataacatggtaagttattttcttctaagtagtcacacatggaaatcttatctaaaattttataccattaacttttatttcacttattaactcataccattaatactttactttagctatgtttggtatgcatgagttgatgagtgattagagtactatgagcgatctcgag

SEQ ID NO: 1005 - DNA (cDNA), 426 bp; double-stranded, linear
gaattcggccttcatggcctactcagttgcagattctggccaacatggacagccagctaaaagagctacagagtcagcatacccattgtgcccaggacctggctatgaaggatgagttactctgccagcttacccagagcaatgaggagcaggctgctcaatggcaaaaggaagagatggcactaaaacacatgcaggcagaactgcagcagcaacaagctgtcctggccaaagaggtgcgggacctgaaagagaccttggagtttgcagaccaggagaatcaggttgctcacctggagctgggtcaggttgagtgtcaattgaaaaccacactggaagtgctccgggagcgcagcttgcagtgtgagaacctcaaggacactgtagagaacctaacggctaaactggccagcaccatagctcgag

SEQ ID NO: 1006 - DNA (cDNA), 402 bp; double-stranded, linear
gaattcggccttcatggcctagagtagccagggagctggaagttccacagattggttttaataaacaaactccctcaatgatgagtggtcttttgaagagcatggttagaacttgggattgtgcttctcatgactacaaatgtacttgtagcttaggtgcaaaagggtaggtcagtgggtagctaactactgaggattgattttcctgacgctggtgtttaagtgtcacccagaactggcatataaagtggctcattcacccaagtatcttcctttcctttttacaaaatccttggctgttgtggggcctacatctcttcatgattattattgcatctggtgtcatgtttttccagctggtgtactgcttccctgtaggcttcttgatgttcactcctcgag

SEQ ID NO: 1007 - DNA (cDNA), 456 bp; double-stranded, linear
gaattcggccttcatggcctactggtgccacgggaggcagacaccaagttctggggtctccagctgcagtgggtggccgccaattgcttctctctgtccagactaatgagaacatggagatcaccagtgcactgcagttggaatagcacgtaaagagggagctgggaaagaagctgggcaagctaaaggacatggtaaccctgccccatccaagaagagctggaaggcgggcaccagcctctggggaggggaggtgtgaagccagaggcagctccagcctgggggacaggtgaccccagcaccctccagggcagtcctgtgactgtttcttgcttcccgccctctgacatttagtggtgggttcgttcttcctaggtctggacatcatcatcccagctggagtcatggagcctcccaaacatagggaaagagatggtggtataagaggctctcgag

SEQ ID NO: 1008 - DNA (cDNA), 564 bp; double-stranded, linear
gaattcggccaaagaggcctaggatggctgtgtttgacgggtgttgctcgtgacagttggggtcctcctcagcatcagtcttgacatggctgcaactgggggggtcctcgggatcctcccggaatctcttcctcagcattcgctcatgataaggtttcaggtgtcttgatggttcagtcctggagaaacataagcataacctctaccccaagttattattttacctatttcccaactttctgttatcaggtctctccaccaaaccagttgttctgcttctgtctttgcagctggtttctgtagatgctgttcagctgctgataagatccggcctttaggcaggctcaaaaaatttaaagttaataatgcgattcaattgcttatggggtgtcctgtagtacctgttttcccccttttgcttctgcaactgctgtttcagggagagattcattctttccactatggcntgtccttcagaattatatgggatatcagtaatgtgtttaatattccgtatagagaaaaatttagctagagcttgagaattaggttccaatcctcgag

SEQ ID NO: 1009 - DNA (cDNA), 661 bp; double-stranded, linear
gaattcggccaaagaggcctagaaaaagatgtcattccgtaaagtaaacatcatcatcttggtcctggctgttgctctcttcttactggttttgcaccataacttcctcagcttgagcagtttgttaaggaatgaggttacagattcaggaattgtagggcctcaacctatagactttgtcccaaatgctctccgacatgcagtagatgggagacaagaggagattcctgtggtcatcgctgcatctgaagacaggcttgggggggccattgcagctataaacagcattcagcacaacactcgctccaatgtgattttctacattgttactctcaacaatacagcagaccatctccggtcctggctcaacagtgattccctgaaaagcatcagatacaaaattgtcaattttgaccctaaacttttggaaggaaaagtaaaggaggatcctgaccagggggaatccatgaaacctttaacctttgcaaggttctacttgccaattctggttcccagcgcaaagaaggccatatacatggatgatgatgtaattgtgcaaggtgatattcttgccctttacaatacagcactgaagccaggacatgcagctgcattttcagaagattgtgattcagcctctactaaagttgtcgatctcgag

SEQ ID NO: 1010 - DNA (cDNA), 316 bp; double-stranded, linear
gaattcggccttcatggcctaggaaagatttgactgcttctctcatgcaggggaataaagcaaaggcacgtgcagagggaagtaggggtagagagaggcaagttagcttcagagagatttatttgcacccagttctgttctactcagcctgacgttttatcatctttttgaaaagtggcgtgaagtggtgtggaacacatcagagggtgaagccgagcaaatctgaaagagagcagaggatttcatatgatatcctatgtgtgctttccccttccttcttaggagctggaagaggcagaattgatgtccactcgag

SEQ ID NO: 1011 - DNA (cDNA), 244 bp; double-stranded, linear
gaattcggccttcatggcctagaaacatgctagacattttgaagaaccagcaagaatgttagtgtagccaacagtgaggcaggcaaaggtgagtaaggtagattagttcagggaagaaaacataacattatttaatccattgtgggccacattgcactatgataacactatcatgtcatagagtctcaccattgtttaagatgtttaaattttttaatacgaatatattctcacacccctcgag

SEQ ID NO: 1012 - DNA (cDNA), 355 bp; double-stranded, linear
gaattcggccttcatggcctagcacttcccgagactctctagccttggataaagagagaatggataaagatctgggatctgtgcagggatttgaagatacaaataaatccgagagaactgagagtctggaaggagatgacgagtccaagttagatgatgcacattcattaggctctggtgctggagaaggatacgagccaatcagtgatgacgaactagatgaaattctggcaggtgatgcagaaaagagggaggaccaacaggatgaggagaagatgccagatcccttagatgtgatagatgtggattggtctggtcttatgccaaagcatccaaaagaacaacgaggctcgag

SEQ ID NO: 1013 - DNA (cDNA), 351 bp; double-stranded, linear
gaattcggccttcatggcctacagcctaaatgttttatttcctgagaggctggaatctgtatttgtggtatcaatcagtcaactgaaatttattaaatgcctgctgtgagcaaggcctaatgctgagggatgtaaagaagagtgagaagctagtctggttggggtnatatgacatggcaagtcatagaatgaagaagcgtattccttgtcatatgaaagctgcagattagtgtggttctaagtagaggccagggtcactggagtctaggattgcagggttggctggcttcccagaggctaagaatttaatttggatcttgaagatctggtccaattccaacangactcgag

SEQ ID NO: 1014 - DNA (cDNA), 393 bp; double-stranded, linear
gaattcggccttcatggcctaggccttgtattttttcttattttctgctaaattagaaagaaatttgctgtttcaaatatactcaagctgttcagttcttcaacaaaaagtaggtgactgaaaactgtatgtttaactatgcttaagttaatatttatagtaatgatagaagccattttattggcaatatatcacttcctgatttccacaccaggcattcccacatgcacaaacaggtgtgtgggaggaagggaaatgggcaaaaatgatttccttcaagaggctactgagaatgaaaactcaaaatctgcacaaataggggtggtggaaggagagaaagaaaactccatgccagaaataacatgcttagcagagagagagagagatctcgag

SEQ ID NO: 1015 - DNA (cDNA), 262 bp; double-stranded, linear
gaattcggccttcatggcctaactcagttggcttctaatttgcgtaacaagattaaggtagtatttttgtactattattggaagcatgccttccctttttcacattattaaattgtatttatatttgtgcaattttaaactatgttttcaaataaactttgtctgcggcttcgaggtcttttcaggaatctttcaaaatgggatttggggatcagaactccttctgatcaaatggaatccaatttgtactactggtctcgag

SEQ ID NO: 1016 - DNA (cDNA), 304 bp; double-stranded, linear
cagaatgggactccaagcctgnctcctagggctctttgccctcatcctctctggcaaatgcagttacagcccggagcccgaccagcggaggacgctgcccccaggctgggtgtccctgggccgtgcggaccctgaggaagagctgagtctcacctttgccctgagacagcagaatgtggaaagactctcggagctggtgcaggctgtgtcggatcccagctctcctcaatacggaaaatacctgaccctagagaatgtggctgatctggtgaggccatccccactgaccctccacacgctcgag

SEQ ID NO: 1017 - DNA (cDNA), 355 bp; double-stranded, linear
gaattcggccaaagaggcctagtttaaagaaaaaaaaaaagacccatcaagggcatagaaaagcttaggtgaagaaaccctaaaatgaatcctcatttatcaactcattcatttattgattcatttgttcattcatttgttcactcaagaagtatttgttgccagacacagtaccaacaaagaaaataagcatccactacggctttgcagagcttggtacgcaatgcctggttcagaggagatatttgttcatcgcttgcttttaactgtatcacagcctagggtggcatgcagaggtttgaataagtgctgaaacaggacaagtgaggtgcttatggaaacacacaggctcgag

SEQ ID NO: 1018 - DNA (cDNA), 502 bp; double-stranded, linear
gaattcggccaaagaggcctagaaggaaattgtcccgaatccctgcagtctttctgtaggttgcggcacaacgccaggcaaaagaagaggaaggaatttaatcctaatcggtggaggtcgatttgagggtctgctgtagcaggtggctccgcttgaagcgagggaggaagtttcctccgatcagtagagattggaaagattgttgggagtggcacaccactagggaaaagaagaaggggcgaactgcttgtcttgaggaggtcaacccccagaatcagctcttgtggccttgaagtggctgaagacgatcaccctccacaggcttgagcccagtcccacagccttcctcccccagcctgagtgactactctattccttggtccctgctattgtcggggacgattgcatgggctacgccaggaaagtaggctgggtgaccgcaggcctggtgattggggctggcgcctgctattgcatttatagactgactagggggctcgag

SEQ ID NO: 1019 - DNA (cDNA), 465 bp; double-stranded, linear
gaattcggccaaagaggcctaatcaaatagtaaaggctgttctggctttttatcttcttagctcatcttaaataagtagtacacttggatgcagtgcgtctgaagtgctaatcagttgtaacaatagcacaaatcgaacttaggatttgtttcttctcttctgtgtttcgatttttgatcaattctttaattttggaagcctataatacagttttctattcttggagataaaaattaaatggatcactgatattttagtcattctgcttctcatctaaatatttccatattctgtattaggagaaaattaccctcccagcaccagcccccctctcaaacccccaacccaaaaccaagcattttggaatgagtctcctttagtttcagagtgtggattgtataacccatatactcttcgatgtacttgtttggtttggtattaatttgactgtgcacgatctcgag

SEQ ID NO: 1020 - DNA (cDNA), 243 bp; double-stranded, linear
gaattcggccttcatggcctaggatttcgtatgcaagctcttgtttctcaggctgcctgcagaagaagtcgctataaattatctgttgtctacatggtacaaggcccattgactcatctgatgcttgttttgttaatttctttaatatttttatcacggggcagtgggagggcttgggcttttagccacagctgttttaagacttctgatctcctgccctgcaggaataggtggcaactcgag

SEQ ID NO: 1021 - DNA (cDNA), 442 bp; double-stranded, linear
ctccaccgagagcctggacagtatgaaggctctgacagccgccatcgaagctgcaaacgcccagatccatggccctgccagtcaacacatgggcaataacactgccaccgtcaccaccacgactaccatagccaccgtcaccacggaggacaggaagaaggaccactttaagaaaaatcgatgcctgtctatcgggatacaggtggatgatgctgaagaacctgacaaaacaggggagaataaagcacccagtaagttccagtccgtgggagtgcaagtagaagaagagaagtgcttccgcaggttcactcgatccaacagtgtgacgacagcagtacaggccgacctggacttccatgataatctggaaaattctctggaatctatagaggacaattcgtgtcctggccccatggccagacagttctcccgcgatctcgag

SEQ ID NO: 1022 - DNA (cDNA), 274 bp; double-stranded, linear
gaattcggccttcatggcctagatgatcaggtttttctggatggaaatgaggtgtatgtatggatctatgacccagttcactttaaaacatttgtcatgggattaattcttgtgattgcagtaatagcggccaccctcttccccctttggccagcagaaatgagagtaggtgtttattacctcagtgtgggtgcaggctgttttgtagccagtattcttctccttgctgttgctcgatgcattctatttctcatcatttggctcataactcgag

SEQ ID NO: 1023 - DNA (cDNA), 196 bp; double-stranded, linear
gaattcggccttcatggcctacttttccagaaaccaagagtggctctactgtggctatattattattgttattattattattttggagatggggtctcactttgtcatccaggctggagagcagtggcaccatcatagctcactacagccccaaactgctgtgctcaagggatcctcctgtctcagccttctcgag

SEQ ID NO: 1024 - DNA (cDNA), 395 bp; double-stranded, linear
gaattcggccttcatggcctaatcatttatataaagtttaaaaacatttcagaactgaactatatatttttagaaatatctgcatatgccacataaatttttaaaatcataagaatgctaaacagcacattcaggacagggtgaagaaacaggcatgcaggttgtgcagtaggaagctgggtaacattgttccttatggctttgttgtcgcttccagaatttcattaaaaactttttaaaaaacatgggcccacattatgaattacgtctgcttttagagtactaaaaactccaagcaaaaacacatgagccaccgggcacgcctggcctttattttatttttctacgttattattcctgttttcagaggagggaattgtcagggaactctcgag

SEQ ID NO: 1025 - DNA (cDNA), 429 bp; double-stranded, linear
ggagagctctgggccagcccttctctctctctctctctctctctctctctctctctctctctctctctctctctctctctctctctctctctctgtgtgtgtatatatatatatatanacttttcccttctggatgcaatagagctatttttttctctttggaattgagtgacaccaccaagatacgtttttgggttgaatatgtgtgtttttcaaaattcagtctggccttttttgttgttgttgttgttgttttctttagatggagtttcactcttgttgcccagtctggagtgcaatggcactatctctactcactgctacctccgcctcccaggttcaagcaattctcctgcctcagcctcccaagtagctgggattataggcatgtgccaccatgcccaggcagtttttgtatttagtctcgag

SEQ ID NO: 1026 - DNA (cDNA), 407 bp; double-stranded, linear
gaattcggccttcatggcctagagaactggagccagctgtcaactgcccccgccccacccaggccatttggcttctgctaccggcatgctgctcagggctctgcccaaggacaacgacgagccccctgtgtcctctcctgggtcatcttccatgaccctgaggcagcgaagacaagctcggcagctccctgagctgcttcacaccaactacctatgagtctgaggccagcatccaggcgctgcccagaccctgagagtccctggaccatgacgtagcctgtgtgtgaagggagcaagacagccttgacagaagcacagagaacgccactgggattcttaaagacgcgaagggaaaaagcacagaagatgctggcgctgcatctcctccagcaccgagaggcctcgag

SEQ ID NO: 1027 - DNA (cDNA), 402 bp; double-stranded, linear
gaattcggccttcatggcctaaattaatatccttatttttgcagattaggaaactaagacgtactgaggctgggtgcctggttcaagatcatatagctaacattattggacatgcaaatcaagcccagatttgtgactctgagctgatgttaattctgtcacaatattggttctcaagataaatctttccaggtgagggggaaagggaataaatatctagaagtccccttaaacagaagtaattaattcgtttgcagaaattggcaaaatttggggttcccttcttaaaagtttccttctgtcacttggaaaaaatttaaaatatgtgcattaggttgacaaagatcaaaaaagttaaaaaaaaaccctttttggaatgctgtggagaaagtagcactcgag

SEQ ID NO: 1028 - DNA (cDNA), 320 bp; double-stranded, linear
gaattcggccttcatggcctaaggggctgaaattaagaatgtggcttttttatcctttcaaaaatagattatttggctggatgtggtggctcacgcctgtaatcctagcattttgggaggctgaggcaggcagatcacctgaggtaaggagttcaagacaagcatgtcctggtgaaaccccatctctactaaaaatacaaaaaattagccaggtgtggtggcaggttcctgtagtcccagctacatgggaggctgaggcaggagactcacttgaacccggagtgtctcgaggcaggtctagaattcaattaggccatgaa

SEQ ID NO: 1029 - DNA (cDNA), 252 bp; double-stranded, linear
gcagattttcgctctcatcccatatctattgagaatgctgtagttgagggttgttagaaacctgcattttattaaaatccctccaggtgattctgatgcaggctagttcagtaaacaatatcaactagttttcataaagaaaacctctggagggcccatagtgcctgcactccaggtctcaaagtatactttgagatctaggttatctgccaaggtgctatcctgaaaggactctaaatgagacaactcgag

SEQ ID NO: 1030 - DNA (cDNA), 280 bp; double-stranded, linear
gaattcggccttcatggcctaccttatggcctaattaaatattagtaataggtattcgatttgtttttaaatgatttcttgtaatagactattgggtcagctaatacttttttgcatcttcatattttatgtcatgttaatgataaattttctgactttgatttgtatgtttttgccctttatcctcttaggtggccttgggggacttgcaggtctgagtagcttgggtttgaatactaccaacttctctgaactacagagtcagatgcagcatctcgag

SEQ ID NO: 1031 - DNA (cDNA), 291 bp; double-stranded, linear
gaattcggccttcatggcctagagcaagtggtttttaaatatcttcgagctgaacctgaggaccattattttttaatgacagaacctccactcaatacaccagaaaacagagagtatcttgcagaaattatgtttgaatcatttaacgtaccaggactctacattgcagttcaggcagtgctggccttggcggcatcttggacatctcgacaagtgggtgaacgtacgttaacggggatagtcattgacagcggagatggagtcacccatgttatcccagtggctctcgag

SEQ ID NO: 1032 - DNA (cDNA), 277 bp; double-stranded, linear
taaaataatttaacttttttattacattaaaaaacaggactctgggaattgtcactttatgatcagccttatattttttccagactgtgtcattgtgtatgcctgtgccacccaacggatgagaccactgatcatgtttagctcaaatttatgttggatagaggttataggatggtccttatctgaatgcagaaaggaatgtttattttgctgttatgttttatatgggataatactttataattgtgtgactatcctattccccaacaaactcgag

SEQ ID NO: 1033 - DNA (cDNA), 298 bp; double-stranded, linear
gaattcggccttcatggcctaggttacatgtataaaataatcgtagctgttaatcaaactgatcatttgctatttgttgtttcacatgttttcatttatttgttcattcagcaaacacttagttgtgtgccaggaattaaaatccagtgttgttcttttcttattttttttttggctagtggaaaatgaaaaccactgtgactttgtaaagctgcgggaaatgctcatttgtacaaatatggaggacctgcgagagcagacccataccaggcactatgagctttacaggcatctcgag

SEQ ID NO: 1034 - DNA (cDNA), 339 bp; double-stranded, linear
gaattctggaagacactgactgactggaagacctggatttctttctggaagacactgattgactggaagacctggatttctttctggaagacactgattgactggaagatctagatttttctggaagaactagatttactggaagacttggatttggtggaagacgtagatttttctggaagacactgactgactggaagacctggatttctttctggaagacactgattgactggaagacctggatttctttctggaagacactgattgactggaagatctagatttttctggaagaactagatttactggaagacttggtaggccatgaaggtcgag

SEQ ID NO: 1035 - DNA (cDNA), 263 bp; double-stranded, linear
gaattcggccaaagaggcctagcactgtaaagatgaagctggctaactggtactggctgagctcagctgttcttgccacttacggttttttggttgtggcaaacaatgaaacagaggaaattaaagatgaaagagcaaaggatgtctgcccagtgagactagaaagcagagggaaatgcgaagaggcaggggagtgcccctaccaggtaagcctgccccccttgactattcagctcccgaagcaattcagcagagatctcgag

SEQ ID NO: 1036 - DNA (cDNA), 262 bp; double-stranded, linear
gaattcggccaaagaggcctaaagcacccgcttcctcaccacccccactgttgggcctatagtagcaggttagtgagtacctagggcggctcaactcctcccacagcaccaacccagcatggtcccactgaagtcctactacgccctcccctccccagccttttccagaaaccatactgggctcagatcagagctccgaagcggtcaaagtgagctgagcaggacaggcccagcctttctccactgccacgtcaccctcgag

SEQ ID NO: 1037 - DNA (cDNA), 285 bp; double-stranded, linear
gaattcggccaaagaggcctacggagctgtcagccaggggagtggggtcagccgtcagccagccctcccgtttcccgcccgtgggccctgaccacactcccttttctagaagtcaatcctaaggtttctctgctctggctaagaggatgtaaatttggattcttagagggcatggcacccccagtccctgcccagataaagtagcacagtggcatgcagcacctctgtctgttgctgacgttggggggcttacacacccacctcatctccgtgcacagactcgag

SEQ ID NO: 1038 - DNA (cDNA), 291 bp; double-stranded, linear
gaattcggccttcatggcctagctctgcaaggaagagagcttcacgtctctggtcagccaagcgaggctgtctctccagctctcagagagctctcggggctctcctgcaggagaccaggccaatgctcctgtgcttcctggggccagtagcagcaccctgagctccctgccaccaggcagctgaaaggcatagcgtgaggtgcttctctcagtcccaattatgacagtggccaccggagacccagcagacgaggctgctgccctccctgggcacccacaggacgcctcgag

SEQ ID NO: 1039 - DNA (cDNA), 393 bp; double-stranded, linear
gaattcggccttcatggcctaactctacagcagtgcttatttttacatttccaagcgaataccaaaaccttcagcaaagattgggttggtattaacgggtttttgtctcagaactgtattgtggatcccggagtttcccccaaatccatctacatcaaatttgtagaagtagagagggattttctttccgcaggctctttagttgagtgcctggaaaaagccattggataccccttaaaatttaacaactgaatgtcatccttcataaggatttgggctcttagctccttcttctctactcacttcccattacccggaccacccctcatccagatgccgccgtcagactcttcatggaaaccctttcttcaattgggccagtacgatctcgag

SEQ ID NO: 1040 - DNA (cDNA), 603 bp; double-stranded, linear
gaattcggccaaagaggcctaccctactgtgacacacctaccatgcggacactcttcaacctcctctggcttgccctggcctgcagccctgttcacactaccctgtcaaagtcagatgccaaaaaagccgcctcaaagacgctgctggagaagagtcagttttcagataagccggtgcaagaccggggtttggtggtgacggacctcaaagctgagagtgtggttcttgagcatcgcagctactgctcggcaaaggcccgggacagacactttgctggggatgtactgggctatgtcactccatggaacagccatggctacgatgtcaccaaggtctttgggagcaagttcacacagatctcacccgtctggctgcagctgaagagacgtggccgtgagatgtttgaggtcacgggcctccacgacgtggaccaagggtggatgcgagctgtcaggaagcatgccaagggcctgcacatagtgcctcggctcctgtttgaggactggacttacgatgatttccggaacgtcttagacagtgaggatgagatagaggagctgagcaagaccgtggtccaggtggcaaagaaccagcatctcgag

SEQ ID NO: 1041 - DNA (cDNA), 292 bp; double-stranded, linear
gaattcggccttcatggcctatagaaacatcagtgggcacatttacaaccagaatgtatcccagaaggactgcaactgcctgcacgtggtggagcccatgccagtgcctggccatgacgtggaggcctactgcctgctgtgcgagtgcaggtacgaggagcgcagcaccaccaccatcaaggtcatcattgtcatctacctgtccgtggtgggtgccctgttgctctacatggccttcctgatgctggtggaccctctgatccgaaagccggatgcacacactgagctcgag

SEQ ID NO: 1042 - DNA (cDNA), 331 bp; double-stranded, linear
gaagaaaagcagaaagaactggcagaaacagaacccaaattcaacagtgtgaaagagaaagaagaacgaggaattgctagattggctcaagctacccaggaaagaacggatctttatgcaaagcagggtcgaggaagccagtttacatcaaaagaagaaagggataagtggattaaaaaggaactcaagtctttagatcaggctattaatgacaagaaaagacagattgctgctatacataaggatttggaagacactgaagcaaataaagagaaaaatctggagcagtataataaactggaccaggatcttaatgaagtcaaagctcgag

SEQ ID NO: 1043 - DNA (cDNA), 268 bp; double-stranded, linear
gatggccacttcccaggctgacatagagaccgacccaggtatctctgaacctgacggtgcaactgcacagacatcagcagatggttcccaggctcagaatctggagtcccggacaataattcggggcaagaggacccgcaagattaataacttgaatgttgaagagaacagcagtggggatcagaggcgggccccactggctgcagggacctggaggtctgcaccagttccagtgaccactcagaacccacctgacgcacccctcgag

SEQ ID NO: 1044 - DNA (cDNA), 391 bp; double-stranded, linear
gtcattgcatccaagataatgaaatatctataaccccaaaagtttcctgtgtccccttgttattcattgccctgcccagtattcaggcaacacggatctgttttctgttttaggttagtttgcattttctataaagtcttatgaatgaaataataaaatgtggactattttcatgggccggggagcagtgtggcttctttcatttcaaatgattgttttgaaattcatccacagcgttgcacgtatcagtagtagattccatttgattgttgatttgtattctattgtatgcctgagtcaaaatttattcatctctttgtctgttgatagccatttgggttcttccagtttggggccattacaaatagaggtactatgaacttttctcgag

SEQ ID NO: 1045 - DNA (cDNA), 288 bp; double-stranded, linear
gaattcggccttcatggcctaatgtgagccaccgcacccagccgaatatttgtactttgtataaattcattgtctgttttacagtttgaatggctcttttaccctggcataattttgtaacgtgtggagcatttggaaaatttttattggattatgcagatattttcaatgctggtatttcattatatgatagtaaaaaatcactttttgttttgttttgttttgtttatttttcttttttttttgaggcagagtttcgtgcttgtcgcccagccgaaggcgctcgag

SEQ ID NO: 1046 - DNA (cDNA), 279 bp; double-stranded, linear
gaattcggccttcatggcctagtaacttcataacattgctggtgttgaggtgaatcttagtggtcatccagtcccaaggcatccttgccagccccctacaatacctggatgggcgcttatcttcaggtaggcctgagcctttctggtaaagaggagctcactatttctaaaggaaacctgtgccattgggttaaaaaagtattaatttttaaacattggtagttgttaagcagttgttgaatattttgagccaaaatttgttacctcccatacctcgag

SEQ ID NO: 1047 - DNA (cDNA), 350 bp; double-stranded, linear
gaattcggccttcatggcctagcagcattcaaggaattaatattagtcactgagaacaaaaagcgaaattagaaaatttcaagtcacttctaggcttgtaggggagaagacgtgtagtgatgaattctatcatttatgaagtacccactggatcccacacactgtgcaagacctttagatcaggcgcctccctcggttttcttcaccctgtgcagcaggtgctgttatttccttttttaaattattatttattattattattttttgagacaggatctccctttgtcactcaggctggaatgcagaggcatgatcactgctcactgcagcttcgaccacccgatctcgag

SEQ ID NO: 1048 - DNA (cDNA), 298 bp; double-stranded, linear
gaattcggccttcatggcctaaagcttttcagtactgtttacaaatttggttttattgtgtcaacttaaaagcatgagtctaaatctattagtcataccaaattgtttcattttattttattttatagagatggggtcttgctgtattgcccaggctggtctcaaacgactaggctcaagcgatcctcccacctcaacctcccaaagtgctgggattacaggtgtaagccaccatacacagttctcaaattattttatacaatacaaacatttaaaatataaatcatgcactctcgag

SEQ ID NO: 1049 - DNA (cDNA), 367 bp; double-stranded, linear
gaattcggccttcatggcctagagctttggtgcttttcacataaggaacttacttgggctaaaaagtaacctcagagaaacagtgctcccatttggtggataaggaaactgaggttccaaacatgagatgtaatagcttgccccaaatctagccagtgagcaagagagtagacttttgcctgtgccaaaacagtaatcaccatccacaagtggctatttaaattttaattattacaattaaataaagtttaaaatccagttccccagtcccactggcaacttaacagctaccagtgactgtaccatatataacagcatatatagacatacagcatatacaacacatacatagggattcccactcgag

SEQ ID NO: 1050 - DNA (cDNA), 367 bp; double-stranded, linear
gaattcggccttcatggcctacaattttaaaattaaaattttttctatttttttgcaattatcaacctaacacattgaagaaacttgggaaatatagaaaaaacacaccaaaaagtatcagagttacactaaaatgttcatagtcagtaatatagtctttcagatttttttttctgtgtctgtctgctgtctatgtccatgcctaccttactttcttccctctctcttccctccccaccctcccttccttccttccctccttcccaccttccctgcttccttcttgcctgcctcccttcctgcctgcctcccttcctgccacttacattctgttaacaatgagaaaaaaattcccccatcactcgag

SEQ ID NO: 1051 - DNA (cDNA), 340 bp; double-stranded, linear
gaattcggccaaagaggcctaagaagacctcagccttcgcctgaaaaagctgactcacgctgccccctgcatgctgttcatgaagggaacacctcaagaaccacgctgtggtttcagcaagcagatggtggaaatccttcacaaacacaatattcagttcagcagctttgatatcttctcagatgaagaagttcgacaggggctcaaaacgtactctaattggcccacctatcctcagctctatgtttctggagagctaataggaggacttgacataattaaggagctggaagcatcagaagagctggacacgatctgtcccaaagcacccaatctcgag

SEQ ID NO: 1052 - DNA (cDNA), 444 bp; double-stranded, linear
gaattcggccttcatggcctactatggacagccacagntcttcccaggacaagaccctgactcaccccagcatggaaactaccagggagggagggtcccccatcctactatgacaaccaggacttccctgccaccaactgggatgacaagagcatccgacaggccttcatccgcaaggtgttcctagtgctgaccttgcagctgtcggtgaccctgtccacggtgtctgtgttcacttttgttgcggaggtgaagggctttgtccgggagaatgtctggacctactatgtctcctatgctgtcttcttcatctctctcatcgtcctcagctgttgtggggacttccggcgaaagcacccctggaaccttgttgcactgtcggtcctgaccgccagcctgtcgtacatggtggggatgatcgccagcttcaacaacacactcgag

SEQ ID NO: 1053 - DNA (cDNA), 358 bp; double-stranded, linear
gaattcggccaaagaggcctagatattcatttccattggagctggtatttttaaggtctcgtgacgtcagtgacctcattttacttgatctattagcagcatttcatacagttgttgactcttctccattaaaacatttactttatttggcttctaggaaacatattttcctgctttttcttcctatttctctgactcttttctcagtttcctttgctgtttccttttctatcctctaaacattgaaatatcctaagcctagtttgggattcccttgatggtcttcatttctttaatgggaactgtgctggtgactcaaatttatatctccagccagaacctttctcctgaattccag

SEQ ID NO: 1054 - DNA (cDNA), 386 bp; double-stranded, linear
ccttcatggcctacttctggtattacatcacactgatcatgctgctggtggccgtgctggccggagctctccagctgacgcagagcagggttctgtgctgtcttccatgcaaagtggaatttgacaatcactgtgccgtgccttgggacatcctgaaagccagcatgaacacatcctctaatcctgggacaccgcttccgctccccctccgaattcagaatgacctccaccgacagcagtactcctatattgatgccgtctgttacgagaaacagctccattggtttgcaaagtttttcccctatctggtgctcttgcacacgctcatctttgcagcctgcagcaacttttggcttcactaccccagtaccagttccaggctcgag

SEQ ID NO: 1055 - DNA (cDNA), 104 bp; double-stranded, linear
cgattgaattctagacctgcctgtgctcctcgatggtgtctctccctccagaaaacgcatgcttattgaccttggttttgatctgcttggccgtgtcgctcgag

SEQ ID NO: 1056 - DNA (cDNA), 650 bp; double-stranded, linear
gaattcggccaaagaggcctacacaaggctaagggtattggatataacggaaagtggaagctatacctgacttccagagaatgtggaccggatataagatcttaatcttctcttatcttactacagaaatctggatggagaagcagtatttatctcaaagagaagtggacctagaggcttatttcactaggaatcacaccgttttgcaaggtactcgattcaaaagagccattttccaagggcaatactgtagaaattttggctgttgtgaagacagagatgatggctgtgtcactgagttctatgcggcgaatgcgttgtgctactgtgataaattctgtgacagagaaaattctgattgctgtcctgactacaagtccttttgccgtgaagagaaagaatggcctcctcacacacagccttggtatccagaaggttgcttcaaagatggtcaacattatgaagagggatcagtaattaaagaaaactgcaactcctgcacatgctcaggacagcaatggaaatgttcccagcatgtatgccttgttcgtccagaattaattgaacaggtcaataaaggagactatggatggacagcacagaattacagccaattttggggaatgactttagaagatggactcctcgag

SEQ ID NO: 1057 - DNA (cDNA), 378 bp; double-stranded, linear
gaattcggccaaagaggcctacacgtattggccaggatggtcttgatctcctgacctcatgatccgccggccttggcctcccaaagtgctaggattacaggcgtgagccatcgcgcccagctgagaatagttttaagaattggttgagaggcagttgctttttctttgaatatctagaactgttctggactaacgtcaaagaaacaccatggcaacattaaagggaagattatttgagaggcgggggatagtatggcttaggacttgggctgctacctttgactttgtaattcaaaagattgtaatgttccatattttcaatctgatcattaaaaatatctgtgttacatgcaaaaaaaaacctataggcaactcgag

SEQ ID NO: 1058 - DNA (cDNA), 259 bp; double-stranded, linear
gaattcggccttcatggcctaattttaacatttacatagacaattcatttggtgttttgtctcctagttatttggcccaatctctgatgatttccactctgtcttggccactcactccgtttgtcatatcttggccattatcatcacctcaaattgctccatcttcaaaatacttgcatcttatttattgaccatattccttccacttggtttattgaactattccctctatcattctctgatttcactgcagccaatg

SEQ ID NO: 1059 - DNA (cDNA), 246 bp; double-stranded, linear
gaaaaaaactactaaccactgcaagctcttgtcaaattttagtttaattggcattgcttgttttttgaaactgaaattacatgagtttcattttttctttgaatttatagggtttagatttctgaaagcagcatgaatatatcacctaacatcctgacaataaattccatccgttgttttttttgtttgtttgttttttcttttcctttaagtaagctctttattcatcttatggtgcagctcgag

SEQ ID NO: 1060 - DNA (cDNA), 103 bp; double-stranded, linear
gaattcggccttcatggcctacgagagtatattggtagggctggaatttctggttcatatggtaactaactctatgttgaacattttgaggagccctctcgag

SEQ ID NO: 1061 - DNA (cDNA), 361 bp; double-stranded, linear
gaattcggccttcatggcctaaaaggttaggcaatcactgggacccgcatggtgttcctccaaagaatagggtaaaggagagctgggagggagccctctccgttgggtgactcttgtgtgccctttagacaggctggcctgccggttccacagggtacagttaggacttgagtctttctttttctgttttgagttggtgagtgagtgatagggtaacatgggccttcaggatgaccccttggaactgtgccgagttccttaaatctcagctgggatcctggacctgggaggcccctgtgagggccagctctggaaaaacctgggagttgatgccggaggctgtggaagaactctgctcgag

SEQ ID NO: 1062 - DNA (cDNA), 292 bp; double-stranded, linear
gaattcggccttcatggcctaagaaaaattgggaacaagctaagtgcccacatagttacaaaaattacgttaaatagatacacggttgcttttaagctccacatacagcaccatagagctttttatatatttgtaggcattaaagcaattccaggaaggatctaaaccaaacacttgacccaggttgtctctctggggagtggagccacatgggatttcactgtttctgtattcttattacttatattaaaacacacatgaacagaagaaaaaatagccccagtatctcgag

SEQ ID NO: 1063 - DNA (cDNA), 331 bp; double-stranded, linear
gaattcggccttcatggcctaccgttgttacacttctggacacaagttgggccgaagtaagccaagcccagtccttcctgtttcctttctcaggaaatgtgaccacgtgcactgggaagctttgtgtaaagtagataggggtatgagccaattgcccagcattggtgttttgttttttgtttgtttgtttgttttcacagagtcttgccctgtcacccaggctggaatgcaatggcgtgatctcagcttactgcaacctctgcctcccaggttcacacaattcacctgcctcagccgcctgagtagctgtgattacgggcaccgtctcgag

SEQ ID NO: 1064 - DNA (cDNA), 136 bp; double-stranded, linear
cgagtgttacattcgttcttccgctcaaatcctgatctggtccattaaagagtgttcgcagacaaagtttctgaaagattagagaagaatcccccaagaatcaattacaaccaaaatggaaagggacaacctcgag

SEQ ID NO: 1065 - DNA (cDNA), 255 bp; double-stranded, linear
gaattcggccttcatggcctagaataaaggaaaattcaggtcatagattgagtgctatatttgaagtaaatacagaccttcaaaaaaatataatatcaaaaatcactgctgagctctcctggccttccatacttagctcaccccggcacttgaaatttccacttactaatacaaactgctcctcagaagaagagattactttagaaaatcctgcagatgttcctgtctatgttcagtttattcctctggctcgag

SEQ ID NO: 1066 - DNA (cDNA), 379 bp; double-stranded, linear
gaattcggccttcatggcctacaacctgctttccaccttctgtaatctcccatcagtgataaattacccatcagctttccagattccagaattttgctgacatctcctgttggctatgttcttatttccttttctgtttattcctgtgaccttgtgccctttaattctttcccataatttgttgggacttcagaaggaagtggagctaaaggcatgtgtctgcctgccccatcttggctggaagttgggaaggccttccttccaaggcacccagcatagcacctggcacatgatggatgctcagcaaatgtctgtgggtcttctttttactaaacaggcagttgatttcaccagaagtagtgaccacctaagtctcgag

SEQ ID NO: 1067 - DNA (cDNA), 316 bp; double-stranded, linear
gaattcggccttcatggcctaacacagctcacatcagaatataatagtggaactagggtgacttcactccctttcacctgatgtctatcttggccttttagcaccttgactatccctgaaaagactgggtctttgttttcccagggaaaaaacgaagtgatgtagatctaagaaatagtgcctctttaatatttaattcttacatgacaactaacacacagggaaaaggctatgttaagttgattatagctcctcttaaaatgtcctatgctgtcagttggtcttagagacatgggaataaccaagcaatctcgag

SEQ ID NO: 1068 - DNA (cDNA), 299 bp; double-stranded, linear
gcgattgaattctagacctcacctctgatctatctcttttacctcagcaatttatttcccaattattatatctactttattgttcttatgagacaatagactatgataattttccagaaataattttgttttcttcctcccatcttctaatgttgagaccgtttctctgttttctttcatctctacccctcagtctcataggtttatttctcatttccaatccagcgatttcaaaacctgtacaacaaaccaactcagcagcccttggcaacttgaggagatttcacaaaccactcgag

SEQ ID NO: 1069 - DNA (cDNA), 256 bp; double-stranded, linear
gaattcggccttcatggcctaccatttccacaaccattttaatctgcgcatcggtcccagacgtagggattcctcgtctcatcttggaaacattgccagcagtggttctgatttggaagcctgcgtctgtcacgtgacaccgtctgagcctgtgcctgcctctctttcttccggcagtgccctgtactctgtggggatgacggcagtgggcctggccatcctgtggtatgttttccgtctggccgggagactcgag

SEQ ID NO: 1070 - DNA (cDNA), 321 bp; double-stranded, linear
gaattcggccttcatggcctagccatcatgtttattagaaggttggattttggtgtgtgctctagacagatacagaataaatacctgcgccttgagaacaggaagtccacgattcatacaaagtgctcactacaggaagttgctgtgtcaaaatccaggcaaggacccaactccgggcagcccctcctccctgctgacctcaacaagggctgtgctattgttttttattttattattttatttctctttattattattaatattattattatttgcttttgctgtggtcactatcattggcaaagttccttttccctcgag

SEQ ID NO: 1071 - DNA (cDNA), 261 bp; double-stranded, linear
gaattcggccttcatggcctagggaggtatttgtcattgtgaaaagctgggaatctcaaacatagtcaacttaactaaaaagaagctaatacaggttgagcattcctaatccaaaaatccagaatccaaattgctccaaaatctgaaactttctgaatgctgacctgatactacaagtagaaaattccacatacaagtacttaacacaaactttgtttcatgcacaaactactaaaaatattgtataaaattaacctcgag

SEQ ID NO: 1072 - DNA (cDNA), 304 bp; double-stranded, linear
gaattcggccttcatggcctacttgggctcattttatttggtgaatttgatcctggctgtggtggccatggcctatgaggagcagaatcaggccaccttggaagaagcagaacaaaaagaggccgaatttcagcagatgctcgaacagcttaaaaagcaacaggaagaagctcaggcagttgcggcagcatcagctgcttcaagagatttcagtggaataggtgggttaggagagctgttggaaagttcttcagaagcatcaaagttgagttccaaaagtgctaaagaatggaggtccctcgag

SEQ ID NO: 1073 - DNA (cDNA), 397 bp; double-stranded, linear
gaattcggccttcatggcctaaaaaagctaatgtcataggtctttatatgtgggcagggtttataagttgtctaaagggccatcaggtagagttggccttttctgttgaggtcccctaaatttcagtggaggtcttctctttggggccagtttctctagaaaactgggtcctgatagtagggtaagaaaagacagctgaggaccccaagatttgtatgatgacttttacttaatccctctatcttcatcctctctcatgcccatccggccccaccccccaaatcctcctctggctgctgaccctcaggttcagtttttcctgtcagtggaggttgagggtggggcgtaggctggctgtggagagtaggggagaggacctgggttccagtagctcgag

SEQ ID NO: 1074 - DNA (cDNA), 309 bp; double-stranded, linear
gcgattgaattctagacctgcaccactgcgatccctacgcctgaggaaatgacaagattgagaagcatgaacagacaactccagataaatgttgactgtacactgaaagaagttgacctccttcaatctagaggaaactttgatccaaaagccatgaataatttttatgacaacatagaacctggcccagttgtaccacccaagccatctaaaaaagactcctcagacccctgcacaattgagagaaaagcccgaagaattagcgtgacctccaaagtacaggcagacatccatgacacccatctcgag

SEQ ID NO: 1075 - DNA (cDNA), 243 bp; double-stranded, linear
gaattcggccttcatggcctagaaaactaaacatttgccttttataaagactgacaaaatataaatctttattctaaccctatccccaaaactagccaggccacaccccagatgttcttattgactattgggaagatagaaaaggcgttgtgttttttgtttttttgttgttgttgtcattgttgttttttcagaagaccagtgtctcagttctgtcttagtagtaccacaccacgactcgag

SEQ ID NO: 1076 - DNA (cDNA), 598 bp; double-stranded, linear
ctcgagctgggggccactttggcacctaacaaaaccagagaaaacaagtgcaactaagcaagcaactatgcacattccagacataaagatcattaataaacgccttaatctaaggatctgttggttctaacgccagaaaaagaagttaaattttaaaaaatatctaaaagagattttaagtgggcaagcaatagagaagatacccaacactgagaaacggaaaggaaaaaagaccaccctaataactactgctcatcaatatacatctataattctaccagaacagtattaagaaatgagaaacgccaatattacataaaataaggtaaaaataactaagcataggttagtgtcaggggacctagggttcagacacccagagttttatataaggataatttgtcctgaatcaagaccacactgtcctctccttaaacctaactgctacaagcagacaccacctcttctgactgggctgaagtgtgggaaacagtccaaaaattaggtatcacaccataaaccctccacaagagcaacctttgctctcaattaagttgttgacaaaataattctcaacttgcctaggcctgccgaattc

SEQ ID NO: 1077 - DNA (cDNA), 346 bp; double-stranded, linear
gaattcggccaaagaggcctaggtgggtatttgaatggttttgctccaaaattgaactcacattgttgatatgacatgaaactagctgcagcaaaaaatccagatacagtagatgaaaagacttgcttttcaggaggcagctggttgccatttaaaaagaagatcatttgcttttcattcaagtctaacagaaatcctactgtatctccttctttccagcatgggtgtatgtgaggcttacttctggcattgtaccaaatcagctgccggcagccatcatacgcacaggagtattcatcatccccaatgccgtagccttcatgattgaggaatttgctgtctcgag

SEQ ID NO: 1078 - DNA (cDNA), 419 bp; double-stranded, linear
gaattcggccaaagagcctagctcctgttaccattattattattcatactcatattcattacttctaacttcaagtgggccattagcactaactggcataccacacttctctagtctatttattctccttgatgactatttcatacccttccctctttccccaaacttccaacacctcctcttcccatcattctcagctgacggccttgctttctcccatgattgggactagagaagcaatttgtagggaatttccacaagctccatcacatgtggccactcatctacatctggatccatctatttggccttccctattgttcttatacactctccctgtcttactttatctaaggtcaacatctccactccacttatgcactagatcctggcattacaccagcaatcctcacctcgag

SEQ ID NO: 1079 - DNA (cDNA), 261 bp; double-stranded, linear
gaattcggccttcatggcctagcttattcttttttctttttctttttttttttttttttcgagacagggtctttctttgtcaccacaggctgcagtgcagtgttgtgatcatagctcactgcagccctcaactccaggcctcaaatgatccttctgactcagcctgctgaatgactgacattacacgtgcatgccgctgtgcccagctaatttttaaattttttgtagagatgaggtcttgctttgttgcccagactcgag

SEQ ID NO: 1080 - DNA (cDNA), 208 bp; double-stranded, linear
gaattcggccttcatggcctacattaacagattaatccatctgtatagggcttttgctgttggatagaatttaaattgtctacataaatatttgttttaggacccttagattttatctgaatacacagattaggctttaaaaacagatatatatgtcatttttggcttaaggagtttggctaagttagcttttcaactggttctcgag

SEQ ID NO: 1081 - DNA (cDNA), 425 bp; double-stranded, linear
gaattcggccttcatgactcctgattcaggggtcagtttacttcataaaaaatcattagaaaaggaagaattatgccaaagacttaaagaacagttagatgctcttgaaaaagaaactgcatctaagctgtcagaaatggattcttttaacaatcaactaaaggaactgagagaaacctacaacacacagcagttagcccttgaacagctttataagatcaaacgtgacaagttgaaggaaattgaaaggaaaagattagaactaatgcagaaaaagaaactagaagatgaggctgcaaggaaagcaaagcaaggaaaagaaaacttatggaaagaaaatcttagaanggaggaagaagaaaaacaaaagcgactccaggaagccaagacaccagnaaaaattccaagaagaggaacgtctcgag

SEQ ID NO: 1082 - DNA (cDNA), 299 bp; double-stranded, linear
gaattcggccttcatggcctaagacttcttgcaggaaaaatgagtgcattgaggatagtaacctgactttctgacctgtgattaaattatgatagtagtcagtcattttactctcccagggtttgaggaagtggccggtgaggacttggagcctagtgaggagttagtagagctgcccagggtggaggaggccacagaggacagccctggtgaagagaacagtgaggccttggatgtgttgatatccagcaaggacctggcactgtctagtgaggacgaggcctgcacaggatctcgag

SEQ ID NO: 1083 - DNA (cDNA), 444 bp; double-stranded, linear
gaattcggccttcatggcctaagtcacttgtgtaacgtagttatactttgctgcattntaattaaccttcaacagctattaaagtggaatgtaagttaaattttgaaggaaaggaaataaatgttttccatatttcgtcttgatttactttctgtatgagaacagctgtgtttttgataggtttatggtttgcatgagttcatatttaaagtgatccaggccaatgcatggctattgctgtaaatcttgatgtttatttctgccttgtaaagttctatcacggcctacctggaatttaaaattcagtagacaaattaattggtcctctgcacaacttttttaataagtagattattttacaaagaaatttgaacaaatttaattgaatcttttgtttagcttgcctctaagaacttttcttaataaagctcccaaacactcgag

SEQ ID NO: 1084 - DNA (cDNA), 268 bp; double-stranded, linear
gagtgagactccctctcaaaggaaaaaaaaaagttttctaggatcaaaataggaaaacagttgtttcagaactcatgatatgagtcatgactacaacccaccatattcagtaaaacctcaccttgtcctgttgtctgacattaagtgttctacgagatccatacctgtgaaatcagctcctctggaatgacagatgctggaataactggctggggctgactgcccaaaagcccagaccctcgatcccgtcctgtccgaataactcgag

SEQ ID NO: 1085 - DNA (cDNA), 251 bp; double-stranded, linear
gaattcggccttcatggcctactttaagtgaacaacancaacaaaaaagttaagggtaagatgaggcagcttttcagtggaaaatacttgtcttggggacagtatgtcatgtccctatacctggtgccattgataaggttattcattcaacaatatttactgatcactggcatatgccaagcactctgccaagtactagggatataaacattagaaagacaagttcctcccttttcagtcacgatctcgag

SEQ ID NO: 1086 - DNA (cDNA), 258 bp; double-stranded, linear
gaattcggccttcatggcctagagcttcacggaggcaagagggtaatggagtgcctaaaaaaagctctaaaaatagcaaatcagtgcatggacccctctctacaagtgcagctttttatagaaattctgaacagatatatctatttttatgaaaaggaaaatgatgcggtaacaattcaggttttaaaccagcttatccaaaagattcgagaagacctcccgaatcttgaatccagtgaagaaacagagcaactcgag

SEQ ID NO: 1087 - DNA (cDNA), 391 bp; double-stranded, linear
gaattcggccttcatggcctaataaaaagaattatcaaagaattgcaggggaaaccccatagagaagactcattcttagatgagtatacaatccatgggggtctttaggatatttaactgatttgggagaggtcggataaagaaaaaggagcattaaccttgactatgcctttagctccagccgcctctttaagaggaaattgttgggcaggtgggggaaggctagtcatggaacgaaactgtaagccagatcgggtgtgaggaggggaggtgataaaaggattatagggtgggagagcacaggctgaggaagaattgggacctggctcagcctggcaaggcacagcctggggaggaggggagaggtcctgtagaaaaggaggatctcgag

SEQ ID NO: 1088 - DNA (cDNA), 368 bp; double-stranded, linear
gaattcggccttcatggcctagccttcnaagtttgaatggcccttaggttttaagttatctatgcaaagatgaanaaggccttcacattctcaaaggtgacaactcatacccagccatttgcttatttttgcctgcagacctccaatggaagtccgggcacatggcggagagcctcaccaacatgccacggcactccctctacatcatcattggagccctctgcgtggccttcatccttatgctgatcatcctgatcgtggggatttgccgcatcagccgcattgaataccagggttcttccaggccagcctatgaggagttctacaactgccgcagcatcgacagcgagttcagcaatgcactcgag

SEQ ID NO: 1089 - DNA (cDNA), 409 bp; double-stranded, linear
gaattcggccttatggcctagttcatttaactaatacttgtattaaatcacttctaaatgcttattataccctgtattatagtattatattctgagtcttaaaggtgcttaatgtgaagattctctctctacatattcaactcttactaacttttggctttaggtagaaatcagttagtgtattatatgataaaataggaaactatttccctaggggtataggtattcagtagggagctttggagtctcaatgagcttcttaaagaagcatttttaatggtaggttttagggagagtttttgtagtaagataaagtagatgagaaagtgttgcctctaaacaatcaacaagctgggaatggggtgcagaatgaggagaaccctaagcaataggcaataagaagctcgag

SEQ ID NO: 1090 - DNA (cDNA), 359 bp; double-stranded, linear
gaattcggccttggcctagtgagagagcgtcaaaaaaacttccatctcagccaaccactgatactagtactgacaaagaaagaacttcagaggacatggctgataaagaaaaatctacagctgactctggaggtgaaggactggaaacagccccaaagtctgaagagttcagcgacctcccctgtccagtcgaagaaattaaaaattacacaaaagagcataataatttaattctgctaaataaggatgttcaacaggaaagcagtgagcaaaaaaataaatcaacagacaaaggtgaaaagaagccagacagcaatgagaaaggagaaagaaagaaagaaaagaaggaaaagctcgag

SEQ ID NO: 1091 - DNA (cDNA), 280 bp; double-stranded, linear
gaattcggccttcatggcctacatgttcattctaagaaacttaactccatttttaagctttaagattcccccgatcccaaataacctaacacaccaaaagccttgccatttcacacatgctgttcctttgcttagaaccttttcaatgtctagctcactctgtttgggacttcttttttcttttcttttttttgagacagggtctggctctgtcatccaggctggagtgcaatggggcaatttcggctcactgcaacctccgcccttccaggctcaagcg

SEQ ID NO: 1092 - DNA (cDNA), 443 bp; double-stranded, linear
ggaaaattgagaaaaccatgaaagaaaaagaagaactgttaaagttaattgccgttctggaaaaagaaacagcacaacttcgagaacaagttgggagaatggaaagagaacttaaccatgagaaagaaagatgtgaccaactgcaagcagaacaaaagggtcttactgaagtaacacaaagcttaaaaatggaaaatgaagagtttaagaagaggttcagtgatgctacatccaaagcccatcagcttgaggaagatattgtgtcagtaacacataaagcaattgaaaaagaaaccgaattagacagtttaaaggacaaactcaagaaggcacaacatgaaagagaacaacttgaatgtcagttgaagacagagaaggatgaaaaggaactttataaggtacatttgaagaatacagaaatagaaaataccaagcttctcgag

SEQ ID NO: 1093 - DNA (cDNA), 256 bp; double-stranded, linear
gaattcggccttcatggcctacctccattgtatattaacatttatcataattattatttgctcattcaaaaaatattgctctgatatggtattgaatattcctcacataggaaaatatgaacagtttatttgccacccagatggtttggaagcctataccctccaagacattgagaaaagaaaaatctttctctcaggagagagaatgagtgccaagcaatgggagaagccccttaaaaaaccatcagatctcgag

SEQ ID NO: 1094 - DNA (cDNA), 454 bp; double-stranded, linear
gaattcggccttcatggcctaagctgttagtgattctgacacccttggacctccaggagtagctcctcctgccacgagaggactctggcttttctaataaggaaggttctggccaatcagtccaagaaaggcccggattctcttccaaggtgttgtctctgcagaaatgttcctcagggtggaaggtgctgctgcagcaagggatgtcccctgagttttcaggtatgtagtctgtggctgcagcaggtgaacactcctcacactcccatttcttactgttagatctaagagaggagcagtccctgtgggttccgtgggatccgcatgtagcacacagaatgaggcaccacctcccttcatcctcaaagctgtctctgccttgttcatacagacagatgggggcatcacagtgctgatagcgctgatataagtctgagaaagcccctggctcgag

SEQ ID NO: 1095 - DNA (cDNA), 449 bp; double-stranded, linear
gaattcggccttcatggcctagtgatctcatctctccgtccatgggcgaaaaaacagccatcaccaggccattcacgctttgtgcttttgttagcagagcccaggcagccctgcagcccacatctagggtacaaacggaacggcggcgttttccttgtatcatttagaggaaatttttgagctgaacagtattttttttctccctctctctctctctgaaatattgctgagatttaaaggaggacgaagacaacagattcatagctgggtcttgctgttttcctgacgctgaccacagcggatctagtttctctgcagaagacagcaagatgccccagggaatgtttgtgaaaaaggatgactggatgggaagcaagctgaagaaaaagaaggaaagaaagagagaaatcagtaaatcaccacacaagaggtggagaagaggactcgag

SEQ ID NO: 1096 - DNA (cDNA), 166 bp; double-stranded, linear
gactggccgcaagggacgggttgtgagcaatgatgatggaagcatatcttatgagtcaagatctgaacttgatgtgcctgtggaaatactaaacatcacagaaaaacaacgatttatggatggagataagaatattgctatcatctcagaagctgccatgctcgag

SEQ ID NO: 1097 - DNA (cDNA), 501 bp; double-stranded, linear
gaattcggccttcatggcctacattatttacacctgtcccagactttgattcaggaactaatgctgcaaagcaaggactatgatggaaaatgctcactgcaagaatggtagctgcagcaagatcaagatcccagaaagcagtggccaaggcactcactgtagactttagtgcctgcagcatctggtgcaagctacactgtctacgcccaggaacacagcagcagcatccggcctgggccaattctgtgtaagatttgatgcgctgtccctggctgcagtgcctgcagacatctctctctagcccttctaacaatttcacagcaactcaacatctttaaaaatttattagccaaccaaaatcagcttctgtggcatgcaagtaaaaacccaggctgatatgtctgaatacagaagatttatattagttccttagagtcaataatccatacagactctattctagcttctttgtgaagtgggtaagaattcctctgcctcgag

SEQ ID NO: 1098 - DNA (cDNA), 282 bp; double-stranded, linear
gaattcggccttcatggcctacttcaaaaacatatattaatatttttgtaccacgtaagttcatcagaagcctgactttaatctctgatttattatatttgaacactgtgaagaagcagtttaacactgaacgaaagtgtcgtaatgcagctttcaaagtggccattaaagacagatctctgcttttctattagtacattttctaagatgactatcattgccattgtagtcagctttgtgtacctttatagagattccagtataaacccagaaacgctcgag

SEQ ID NO: 1099 - DNA (cDNA), 266 bp; double-stranded, linear
gaattcggccttcatggcctaggaaacttttcaaagaagtagtccacgagaactaccttgaaagagcaaaaccagccaggtgcagtggctcacgcccataatcccagcactctgggaggcccaggtgggtggatctcgtgaggtcaggagttcaagaccagcttggccaacatggtgaaaccccatctctgctgaaaatacaaaagttagctgaaaatacaaaagtggcacatgcctgtaatgccagctaccgggaaaggctcgag

SEQ ID NO: 1100 - DNA (cDNA), 310 bp; double-stranded, linear
ctcgagcgtatcccagaacttaaagtataataataataataataataataataataataataataaaaccttccaacaagcttcctttccaccacaggaaatcctgttgggagttccccctgaaccaaaaaaaaaaaaagatagagtataaaacatacacttttcaggaatgcttattgggtaatgtaagataacacctcaaaatgaaactcagaattttattttattttattttttgagatggagtctcacctaggctggagttcagtgtggtaatcttggctcactgtaggccatgaaggccgaattc

SEQ ID NO: 1101 - DNA (cDNA), 367 bp; double-stranded, linear
gcgattgaattctagacctgcctcgagtgtacctcattctgccatctctgatattatgtcatctgatcaagaaacttactcttgtaaacctcatggacggactccacttacctcagctgatgagcatgtacattccaaactggaaggaagtaaagtaacgaaatctaagacttctccggtggtatctggttcatctagtaaatcaaccacccttccaaggccacgacctaccaggacttccctcttgcgcagagcacgacttggtgaagcttcagacagtgaacttgctgatgctgacaaagcatctgttgcttctgaagtatccacaacaagttctacatcaaaacctcccacaggaaggctcgag

SEQ ID NO: 1102 - DNA (cDNA), 368 bp; double-stranded, linear
gaattcggccttcatggcctaagaaagcaagaaagcacgaaagcaatcaagcaagaaagcaagcaggaaagaaacaaaagaaagaaagaangcgagaaaacaagaaagcacgaaagcaagcaagcaagaaagcaagcaagaaagaaacaaaagaaagaaagaaagaaagnaaacaggaaagcaagaaagcacgaaagcaagcnagcaagcaagaaagcaagcaagaaagaaacaaaagaaagaaagaaagaaagaaagaaaaagaaaacaggaaagcaagaaagcacgaaagcaagcaagcaagcaagaaagcaagcatgaaagaaacgaaagaaagaaagaaagcaagaaaacgggaaagactcgag

SEQ ID NO: 1103 - DNA (cDNA), 328 bp; double-stranded, linear
gaattcggccttctggcctagaaacccgtgacacacacacacacacctgcatagatttttcccaagcacacgatatgcacgtggatacacagacttacaagcacagggccacgtgcagacagacacagaccctgtctgcaccacaaacataccacacacagccacacacacagaagccaaacatcctcgcataggtggatacaagcacagactcacatacacatatgcgatacacatatggatacatacacagagtacccccacaaacacacagacacacacgggcagagacagacagagacaggcacagacccccccccacctcgag

SEQ ID NO: 1104 - DNA (cDNA), 246 bp; double-stranded, linear
gaaaaaaactgagttaatggccatgactagatgggaggtcagattcgccgttatatcctctctgttttgcagtttagacacaactgaccagcattgttaaaatggagatcatacggctggtagaacagactctttgtggcccaaaattagcaaattataaatagaatctaaagccatcccaggcaagggttaagttatgcacccctacacttaaagaataaactatgttggccgggccaactcgag

SEQ ID NO: 1105 - DNA (cDNA), 298 bp; double-stranded, linear
gaattcggccttcatggcctacgatcagaaagaaaacacagatctcgaagtcgggatcgaagaagatcaaaaagccgggatcgaaagtcatataagcacaggagcaaaagtcgggacagagaacaagatagaaaatccaaggagaaagaaaagaggggatctgatgataaaaaaagtagagaaagaaggcggagcagaagtagagatcgacgaagaagcagaagccatgatcgatcagaaagaaaacacagatctcgaagtcgggatcgaagaagatcaaaaagccgggaagctcgag

SEQ ID NO: 1106 - DNA (cDNA), 211 bp; double-stranded, linear
gaattcggccaaagaggcctagggatggatggttcagctgctagaatttcgatgcaggacttcttcaaaattgagtggatgatgccttgcagagcctgaaagccgtcattcacgggaaacacatgatccttactgtccgcaatccgggccagctgtgtctcattgaaatctttcacaccaacacagtaaacaattgcaccaagatctcgag

SEQ ID NO: 1107 - DNA (cDNA), 269 bp; double-stranded, linear
gaattcggccaaagaggcctacctgcttgaattggggccccttgtgaagctgctgccgcatctcttccattcgctgcttccggtactgctgcagaaactcttcatcatcttggtcctcattcattatggcaaactccttcagagtcatcttcccactgatcttctcctggaggtctttctgtttctgttgctcctcctcttcatccagatgggacctgcaagtcattgacagcttcttgatcagcctttccatctcccggcaactcgag

SEQ ID NO: 1108 - DNA (cDNA), 133 bp; double-stranded, linear
gaattcggccaaagaggcctatgaaaattgactgcaattagtaaagttggtataacgtacgttcccagttgtgctatttagaattatgatagtattatgctcctacttttctttgatattgagtagtctcgag

SEQ ID NO: 1109 - DNA (cDNA), 123 bp; double-stranded, linear
gaattcggccaaagaggcctagctttttctaatcataaattatatgacctttacagaaaatttagaaaatacagaaaaactgaaaagttacacatggtacaactcacaaccacaatcctcgag

SEQ ID NO: 1110 - DNA (cDNA), 240 bp; double-stranded, linear
gaattcggccaaagaggcctagtgttccagatcctacggcttatgaggattttccgaattctaaagcttgcccggcactcggtaggacttcggtctctaggtgccacactgagacacagctaccatgaagttgggcttctgcttctcttcctctctgtgggcatttccattttctctgtgcttatctactccgtggagaaagatgaccacacatccagcctcaccagcatccccctcgag

SEQ ID NO: 1111 - DNA (cDNA), 264 bp; double-stranded, linear
gaattcggccaaagaggcctaggtggggaggggaggggacaggagaaatgaaataccttcaccgagaactcagcagctgccaccgcagctgcctcctcaggatccggtcgtcggggatagggaagggaggggaaaggggaacggaaaacaaaaaaaagggggagggaagggggaggaaggagtcggggacggcctcaaactcagctcagaggagtcgctgctgcagccgccactcggtacccgctgctaggcctctttgccgag

SEQ ID NO: 1112 - DNA (cDNA), 519 bp; double-stranded, linear
gaattcggccaaagaggcctaaatattagaaaatgtatattatagaacatgatatatatttacattcatctctgtattctctcagctgttgttagaaggacagaatgttaaactttatcttaattagtatactagaaagggcagtataatactgttttaaagtgaaggcatgactgaaactaaaatatttcataaggcttagctagaggcagagtaacgtgtttttgttcattgggcttccttgtacttagttttttcatttaataattcaaaccaacacttttaaaaaaataattcagatgagactgagccatatctgcagtaagagaaatatttcttaatgttttggttacttatgatagagtacttttcttgatactgttaactttgtgctttttaaaaaaagtgattctctaacagacctcttaaattgtgacatgaaggtatgtaattagatttcagaaattggtttattagtgaggaatttttatcaataaatgtcatggggcggcgctcgag

SEQ ID NO: 1113 - DNA (cDNA), 562 bp; double-stranded, linear
ggcccacctagttggtatcccaaattcacacattcaaaagcaaagccatttctcaccttcctccaaaatacttgtaattcctaatatcctgactccaatccattctttattttctattcccaaggcccttcacagaatcgaaacttttgttatgagctcttacatggtgtatcatcaatatgttcactagacaggagttttttttaaaaaaaatcctcatcattcctcttcaattcaagagctctgatggcttccagtctatacaagatatattaaggctcaacttacagttccagtctcacctgccccacctccaccttcccaaaccctctgtattctagccagagcatacctgcattcccttagctcaacatgtgtccttgctcacactgtccctttggttgacctagcttcaattccttcctcatgtgcagttatgtgtctactaagcagcaatgtgaaatgtctttattgtaggtctgtcaaaagctaaagtcatggcccggtgcagtggcttgggcctgtaatcccagcactttggtaggcctctttggccgaattc

SEQ ID NO: 1114 - DNA (cDNA), 435 bp; double-stranded, linear
gaattcggccaaagaggcctattattgctatcgccctcctttcccttattgcctcccaggcaagcagctggtcagtctttgctcagtgtccagcttccaaagcctagacaacctttctgtagcctaaaacgaatggtctttgctccagataactctctttccttgagctgttgtgagctttgaagtaggtggcttgagctagagataaaacagaatcttctgggtagtcccctgttgattatcttcagcccaggcttttgctagatggaatggaaaagcaacttcatttgacacaaagcttctaaagcaggtaaattgtcgggggagagagttagcatgtatgaatgtaaggatgagggaagcgaagcaagaggaacctctcgccatgatcagacatacagctgcctacctaatgaggacttcaagccccctcag

SEQ ID NO: 1115 - DNA (cDNA), 477 bp; double-stranded, linear
gaattcggccaaagaggcctagtgcctagattgatcggtataaggctcactctcccgccccccaaagtggttgatcgttggaacgagaaaagggccatgttcggagtgtatgacaacatcgggatcctgggaaactttgaaaagcaccccaaagaactgatcagggggcccatatggcttcgaggttggaaagggaatgaattgcaacgttgtatccgaaagaggaaaatggttggaagtagaatgttcgctgatgacctgcacaaccttaataaacgcatccgctatctctacaaacactttaaccgacatgggaagtttcgatagaagagaaagctgagaacttcggaaaaggctcatctgtcaccctggagaagggaaactgtacttttccctgtgaggaaacggctttgtattttctctgtaataaaatggggcttctttggaatttgataagcctaggcctctttggccgaa

SEQ ID NO: 1116 - DNA (cDNA), 620 bp; double-stranded, linear
gaattcggccaaagaggcctaagatgaagcccaacatcatctttgtactttccctgctcctcatcttggagaagcaagcagctgtgatgggacaaaaaggtggatcaaaaggccgattaccaagtgaattttcccaatttccacacggacaaaagggccagcactattctggacaaaaaggcaagcaacaaactgaatccaaaggcagtttttctattcaatacacatatcatgtagatgccaatgatcatgaccagtcccgaaaaagtcagcaatatgatttgaatgccctacataagacgacaaaatcacaacgacatctaggtggaagtcaacaactgctccataataaacaagaaggcagagaccatgataaatcaaaaggtcattttcacagggtagttatacaccataaaggaggcaaagctcatcgtgggacacaaaatccttctcaagatcaggggaatagcccatctggaaagggaatatccagtcaatattcaaacacagaagaaaggctgtgggttcatggactaagtaaagaacaaacttccgtctctggtgcacaaaaaggtagaaaacaaggcggatcccaaagcagttatgttctccaaactgaa

SEQ ID NO: 1117 - DNA (cDNA), 158 bp; double-stranded, linear
gaattcggccaaagaggcctagacctgccacatttgttaacatttttccatttctaaaccatccttaaagaaaatcatatatggggtcacaccatcctcacggtagtccaatagagcaaccatgccatctggattcatgttttcaccaaaccctcgag

SEQ ID NO: 1118 - DNA (cDNA), 410 bp; double-stranded, linear
gcactgcttctgttaaagtcactgaccttaacagtttagaactagataaaggaaattttgtggttgaccaaatgtgtgaaataggtaagccagaaccattgaatgaggaggaagcaaggggtgtggttgagaattataatgatgaagaagtgtcaattagagttggtggaaatacacagccaagtaaagttttgaacaaaaaaaatgtagaagctattggacttcttggaggacaaaagagcaaagcagattatgagctatacaacaaagcctctaatcctgataaggttgctagtacagcgtttgctgaaaatagaaattctgagactagtgatactactgggacccatgaatctgatagaaacaaggaatccagtgaccaaacaggcattaatattagtggactcgag

SEQ ID NO: 1119 - DNA (cDNA), 452 bp; double-stranded, linear
gaattcggccttcatggcctagttgccctaatttgcagccgaacttggaagccactgtatccaatggaccttttctgcagctttcttcccagtctcttagccataatgtttttatgtccaccagtcctgcacttcatgggttatcatgtacagcagcaactccgaagatagcaaaattgaatagaaaacgatccagatcagagagtgacagtgagaaagttcagccacttccaatttctaccattatccgaggcccaacactgggggcatctgctcctgtgacagtgaaacgggagagcaaaatttctcttcaacctatagcaactgttcccaatggaggcacaacacctaaaatcagcaaaactgtacttttatctactaaaagcatgaaaaagagtcatgaacatggatccaagaaatctcactctaaaaccaagccaggttatctcgag

SEQ ID NO: 1120 - DNA (cDNA), 592 bp; double-stranded, linear
gaattcggccttcatggcctacatgaatctacttctgatccttacctttgttgcagctgctgttgctgccccctttgatgatgatgacaagatcgttgggggctacatctgtgaggagaattctgtcccctaccaggtgtccttgaattctggctaccacttctgcggtggctccctcatcagcgaacagtgggtggtgtcagcaggtcactgctacaagtcccgcatccaggtgagactgggagagcacaacatcgaagtcctggaggggaatgaacagttcatcaatgcagccaagatcatccgccaccccaaatacaacagccggactctggacaatgacatcctgctgatcaagctctcctcacctgccgtcatcaattcccgcgtgtccgccatctctctgcccactgcccctccagctgctggcaccgagtccctcatctccggctggggcaacactctgagttctggtgccgactacccagacgagctgcagtgcctggatgctcctgtgctgagccaggctgagtgtgaagcctcctaccctggaaagattaccaacaacatgttctgtgtgggcttcctcgag

SEQ ID NO: 1121 - DNA (cDNA), 304 bp; double-stranded, linear
gaattcggcttcatggcctaaataatttttattcagaataataaatcactctttatcatagtatcttctcttccctcttcccctttagtttggatagcctaactctgagaagttaacccttaaacagttttctggaagagactgaatttctgggtccttgcagctgtgatggtttcagagctcagactgatcaggcatcaagctaccctcaagagtttctgggctggatgtttcagaacaacatctacaccagtaaagtgtaataggtcagtttcaaaacgaccaaaagaccccaccactcgag

SEQ ID NO: 1122 - DNA (cDNA), 388 bp; double-stranded, linear
gaattcggccttcatggcctagtgaaactccatttttttactgctattactctgtgttttcagttttatgatttggaataccatgatgggaacatctatactaagcattccttggggcataaaacaggctggatttactactggaatgtgtgtcatcatactgatgggccttttaacactttattgctgctacagagtagtgaaatcacggactatgatgttttcgttggataccactagctgggaatatccagatgtctgcagacattatttcggctcctttgggcagtggtcgagtctccttttctccttggtgtctctcattggagcaatgatagtttattgggtgcttatgtcaaattttctttttaatactggtaacctcgag

SEQ ID NO: 1123 - DNA (cDNA), 478 bp; double-stranded, linear
agcaattccataaacacatcctggtgtcatcacagccaaggtttttaggttgctataccaatggcttattaaatgaaaatggcactaaaagtttcttgagattctttatactctctgccttcagcaatcaattccattcatacatcagcactctgctggttctgtttgaaatatgttctgtatttaaaactcaaatcttgttggatctctgcagggcttgtgaccaatgaagtcatatttgttgatggttgacaaagcttgcttcactccatcagagaatgactatcaatttttttttaactgtcctatcacgtcctctcctgtcacccattttgaagagtggcagaacttgaagttcaacttcctctgtaaatatccaagtataaagcccaggaacttctagaataacccagatgcgctttaattttttttaatatgttttgatcacagaactccttaggcctctttggccgaattc

SEQ ID NO: 1124 - DNA (cDNA), 450 bp; double-stranded, linear
gaattcggccaaagaggcctaggaattcagtgcaaacactactttgaactgtggttcctaatttccacgaaagtttttctctgttcttctattatggcacttttcagggtctcccttgtacattttagtttttgtgtttttcagtaagtgccttgagatcagggaccggttctactggtctgttccaaccatagttccttaaacattgtgttccattaatattgggtgaattgaaatgaatttataggaagctccttaacctggggtcctcagacctctatggggtccatggacagaatttgaagtgggaaggatatatgaacttggatggaggaaaattacttatttgttttttaccaacctctcctttgtaatttagccatttgttcaattataatgtaggcaaataaaaataaaaataaaaataaaataaaggcagcttaggcctct

SEQ ID NO: 1125 - DNA (cDNA), 550 bp; double-stranded, linear
gaattcggccaaagaggcctatccttagtggattccgacttccatggccaccgtcctgctgtctatatcaaccaacaccttttctggggtctgatgagcgtcggcatcgggcgccttaacccggcgttcggttcatcccgcagcgccagttctgcttaccaaaagtggcccactaggcactcgcattccacgcccggctccacgccagcgagccgggcttcttacccatttaaagtttgagaataggttgagatcgtttcggccccaagacctctaatcattcgctttaccggataaaactgcgtggcgggggtgcgtcgggtctgcgagagcgccagctatcctgagggaaacttcggagggaaccagctactagatggttcgattagtctttcgcccctatacccaggtcggacgaccgatttgcacgtcaggaccgctacggacctccaccagagtttcctctggcttcgccctgcccaggcatagttcaccatctttcgggtcctaacacgtgcgctcgtgctccacctccccggcgcggcgggcg

SEQ ID NO: 1126 - DNA (cDNA), 381 bp; double-stranded, linear
gaattcggccaaagaggcctagtttgcaggaagaaggcatgggatagtctgagaacaaacaggcactaaatggagcaacatcatcttgaggtgtcaagcaggagctgggagaccagcagagactcccaaggccttgctgctgttggtctgcaggcagctctgtagggcaggctgttgtcattttgcaagtgagcaagcagaagcccaggcaggtgagtcattcactccacagttcataacttggattgtgggttagttacacctgactccaaaacttgactttttactactcagctatactggcctctcaagaaaggctaggccctaatttctagactctcttttaccaataatacctgttgccacgaagtaggcctcttt

SEQ ID NO: 1127 - DNA (cDNA), 361 bp; double-stranded, linear
gaattcggccaaagaggcctactctcaaggtgggcatatgcaaaacataatctctaaattcttcaatactaagaaatacctttgttttacccctaaaatcaaatgccattttggctggatataggattctaggattaaagcctttttccagcagaactttgaagacattgctccatttacttctagcatccagtgtgtccagtgataagtctgctgtcaacctgattcttgttccttggtaggtaatttctcttctctctctagaagcccttattattttctctttatcactagaattccaaaatttcaccaagatgtgtctaggagtcagtctcttttcatcaattttactaggtactcg

SEQ ID NO: 1128 - DNA (cDNA), 359 bp; double-stranded, linear
gcagccaatggcggcgccagaggggaaacngagccttgctnacgggcccaacgctggggagcagccaggccaggtggcgggcgcagacttcgagagcgaggacgagggcgaggaatttgatgactgggaggacgactacgactatcccgaagaggagcagctcagtggtgccggctacagagtatcagccgctcttgaagaagccgacaagatgtttctgagaacaagagaaccagccctggatggcgggtttcagatgcattatgagaagaccccgtttgatcagttagcttttatcgaagagcttttttcactgatggttgtcaatcgtctgaccgaagaacccggctgctctcgag

SEQ ID NO: 1129 - DNA (cDNA), 274 bp; double-stranded, linear
gatggcaccctcctcagaaagcagcgtcccctctcacagtatgtcctcccgacgggacacagactcggatacccaggatgccaatgactcaagctgtaagtcatctgagaggagcctcccggactgtacccctcaccccaactccatcagcatcgatgccggtccccggcaggcccccaagattgcccagatcaagcgcaacctctcctatggagacaacagcgaccctgccctagaggcgtcctcgctgcccccacccgacccctggctcgag

SEQ ID NO: 1130 - DNA (cDNA), 325 bp; double-stranded, linear
ggctttccaccttccctgcggagatgagggtggtggcctccctttttgtcacccttccaagggtcatgctcgtctgctggcttttctccaagatgctgccaaaaatgatcttaataagacacaagcctggttgtgatattttcctgattcaagtgtctctgtggttcttggttgccttcaggagagagttcaagcctcttatggtggtttgtgaggccaggcctgaactagccccatcgtctgttcattcaccaccccagtatccctgctgcaggtttttaaagatctcatgtccctgattgcctgtcactgtgtctgactcgag

SEQ ID NO: 1131 - DNA (cDNA), 639 bp; double-stranded, linear
ctcgaggatccccggggacgggacgggccggggcttggaggggggtcggctgccacaggctcacatcacggcctccatatgcaggatcctcagggcctcggagatctgcgcgctggggtccatctggccgtacatgcccaccaggaaggcccggtggagcagcacagccgcgtgctcttggcacaggagagcgtactcaggcaggttccggagggccgtctgcaccacctcaaagtcctggctgcccaggcagtacatgaacgtngggcaggaaagcggctgcaatgcngggggctgtctgcatggagcgcagggccaggctgaaggcgaggttgcggcaacactcctcggccgagctcatcagccgctgcaggttggtcgagaagaagctcaggatctcgggtctccgccgggacatctcgtctatgtcactcagaacctccagcagatcctccaccgtttggccccgggaaagccgtttcatgtagggggccatctcggccgcggtcagaggggtgaacagggagacgctgaccaggggcaaggagccggctgagctctcctcctcgccctcttcgtccaggcctcggtcggtcctgtcgtccctgctgggcaggctgagccctgcaaggagggatc

SEQ ID NO: 1132 - DNA (cDNA), 448 bp; double-stranded, linear
ggtctgtggtcttggaggcttaaattgtaaaatacatcccttatggaatcctaaattcctctaggtgtttttggaaggcgcatttgagccttgtgagctaaaatggaatggatttaatatttcctatctggcatttccatcttgcccctggtacacaagtcactggcctggaactcagccttgattcactgtccgtcttcacggattagctgtgctgttatgttgtctgtgctgcagattggcccatgtgggaagtcgggggggacctgatttcctgcttggaagacttgggggactgccgagcatatcaaagtgtttatagtcaccaagtgaactgcagcacaaccatctcctctccagcaagccctgaagtcagtagtgcctgcaggtgaaaccaaccagccctgtgttagaggaggaaaagcggagatgacgtggaagtctcgag

SEQ ID NO: 1133 - DNA (cDNA), 372 bp; double-stranded, linear
gaattcggccttcatggcctagggctatggccggagcttgagatacgccgctctgaatcttgccgccctgcactgccgcttcggtcactatcaacaggcagagctcgccctgcaggaggcaattaggattgcccaggagtccaacgatcacgtgtgtctccagcactgtttgagctggctttatgtgctggggcagaagagatccgatagctatgttctgctggagcattctgtgaagaaggcagtacattttgggttaccgagagcttttgctgggaagacggcaaacaagctgatggatgccctaaaggactccgacctcctgcactggaaacacagcctgtcagagctcatcgatatcaacatctcgag

SEQ ID NO: 1134 - DNA (cDNA), 452 bp; double-stranded, linear
gaattcggccttcatggcctagctggttcttttattttggtgtctcagggatgtaaaagatttttagtgcataatattaaatggcaaaatcaaatttcccaacaatatacaaaataaaatcccatttacaaagggaaaaggctttatctatttgtatatcttcttatatgtatataaattcatagaaaactatctggaagtgtatgtagcaaagcattaacaatggttatctctgggtataagaaggaactagaactgaagaagatggtggtgataagggaaggtatacctttcttttttttttattctgctgtgcttgagttttaaagaatgagaatattcatgtattccttgtataattataacacagaaaacctccttattaggaataggaggctgatttcttttttaatgactgatcttaggtcctttttgggtatttctccctcgag

SEQ ID NO: 1135 - DNA (cDNA), 283 bp; double-stranded, linear
gaattcggccttcatggcctaggaggagggaaggattgggagcagtggggtgtgagtgggagaggaggtagggaaccagatggggagaatcgagccaagttctgggttggaggaaactttcttatttaactgagctggtgggttacatatctaatgttgcaggtgatgaatacaggctggggtagccgtctaaatccaccgaaagaagtaaatgaaagtggtttcttgtaggtcgaaaggtcaaggtaaatggctggtttttaggaaacaactgatcctcgag

SEQ ID NO: 1136 - DNA (cDNA), 264 bp; double-stranded, linear
gaattcggccttcatggcctactggagacttgtaattagtctaagcataatatgattaggtggatgaaatattttggagtttggttttgttttaaatgtaaatactcatgaaaagtaaaacatactgcactgtgtccctgggaatatttttgttatctttaaaatactcagtattataggcatttattaacacagccttacatttgcccggtttgacctggaggccgaaatgaattgtgacttatgtcccagctgggtctcgag

SEQ ID NO: 1137 - DNA (cDNA), 653 bp; double-stranded, linear
gaattcggccttcatggcctaccacgtttcctcacctgtaaaatggacactgcagctatgtctgctgttccacattgttgatagaactggatgctgtggtgacatttgggacactatcatggtgcctggggtgggtgggtgcccaggcctgtgggcttctgtctttcatcaaagaacttcagatcccagaaaattaagattctcaaaacataactgtcggaaagggcttttgaatccaccttggtggcctcttcctgcctccagggctcatgagataggctgacttcatatgaaagttttgaggatgaggaagtctctctcctcttcagatactgaccctctctctccttatttccttggtgcccagaatagggctttggttatcttgaatgaatgaatataaactcacaggtgtgatctgagccacctaaagccctctttgggttctgctcagcttgagggcatcacctaaaggccactggctgcattttccaggaggtgttttctaagctgtatctatataggaatggggaggaaagctaagtcattgtagactgagagaaagggaataagagtctgttccagaccagctagggctgacaagcttaggcagctgggggcagagggcactgagaatgaggccctagctcgag

SEQ ID NO: 1138 - DNA (cDNA), 315 bp; double-stranded, linear
gaattcggccttcatggcctacaaaaggttcttgatgaccaccacaatcctcgcttaatcaaagatcttctgcaagacctaagctctaccctctgcattcttattagaggagtagggaagtctgtattagtgggaaacatcaatatttggatttgccgattagaaactattctcgcctggcaacaacagctacaggatcttcagatgactaagcaagtgaacaatggcctcaccctcagtgaccttcctctgcacatgctgaacaacatcctataccggttctcagacggatgggacatcatcaccattctcgag

SEQ ID NO: 1139 - DNA (cDNA), 304 bp; double-stranded, linear
gaattcggccaaagaggcctagttaatacttattttattttctgtttttatcatctagtcaactcgcaaacttccagcatttgtctaaatctactcaatatattccagtacatcagataatatatcagtttcatcctcctgaaaaactcttttccagtgtatcctgacctgctctaattttgacttgatgctttctgtatctggtgcacagctgttaccttggaatcttcccttcatcattattcagagtgtttctgtagtttttctcttgcattggattttgtgcttcctgaatcctctcgag

SEQ ID NO: 1140 - DNA (cDNA), 303 bp; double-stranded, linear
gaattcggccaaagaggcctagggttttgtttggtttggttttagttttttgtgggagaattaagattttttaagagatattttcagatttttctgttgtcagttttggtaatttgtgtcttttaggaaaatttcatttcatccaagttgttggatttattggcataaaatttttcagaatattcctttaatatccttctaatgtctgtagaatctaatctgtattgcagtctcttcatattggtaatttgtgttttttctattttttcctggatcagtcagtctagctggggagaactcgag

SEQ ID NO: 1141 - DNA (cDNA), 330 bp; double-stranded, linear
gaattcggccaaagaggcctagtagcttagttattgtttactttgaagcccttttgcctctactctctcccatatatcttctcctgacagggtgaagtcacctatagcatttcctagtgtatggaagtattaatttctttctttactggaagagctactagcttttcttcatacagtttcctctgctccagtttcataagtttctttttggcttgtatctgtttaggatcaggtgatatggcttcatttctcatgactgaagcccggcaacataacactgaaattcgaatggcagtcagcaaagtggctgataaaacggatcatctcgag

SEQ ID NO: 1142 - DNA (cDNA), 294 bp; double-stranded, linear
gaattcggccaaagaggcctagaggggagcctggcctctggcatattcatcaagtatgagttctggggatgagtcactgtaatgatgtgagcagggagccttcctccctgggccacctgcagagagctttcccaccaactttgtaccttgattgccttacaaagttatttgtttacaaacagcgaccatataaaagcctcctgccccaaagcttgtgggcacatgggcacatacagactcacatacagacacacacatatatgtacagacatgtactctcacactccagtcgag

SEQ ID NO: 1143 - DNA (cDNA), 331 bp; double-stranded, linear
gaattcggccaaagaggcctagttttagttcagaataacattaattttgagagattgaggtaaagaaccttaactaatgctaaggagtttattttgattaacataggttattctgaccaccacctcttccttccttaatctccttagaatctgacagtctcaaagctgtcacacaaattagactaattttgacactttgaaatgaaaacttcaaggaagaagtagccacggacagttatgtttataatcagtaggtggcactctttcctcaggtagccccccattttcacatgatgtgtttgaaggttaaatgccaccaaaagtgctcgag

SEQ ID NO: 1144 - DNA (cDNA), 508 bp; double-stranded, linear
gaattcggccaaagaggcctacttcagcatgactactcagttgccagcttacgtggcaattttgcttttctatgtctcaagagccagctgccaggacactttcactgcagctgtttatgagcatgcagcgatattgcccaatgccaccctaacaccagtgtctcgtgaggaggctttggcattaatgaatcggaatctggacattttggaaggagcgatcacatcagcagcagatcagggtgcgcatattattgtgactccagaagatgctatttatggctggaacttcaacagggactctctctacccatatttggaggacatcccagaccctgaagtaaactggatcccctgtaataatcgtaacagatttggccagaccccagtacaagaaagactcagctgcctggccaagaacaactctatctatgttgtggcaaatattggggacaagaagccatgcgataccagtgatcctcagtgtccccctgatggccgttcgctcgag

SEQ ID NO: 1145 - DNA (cDNA), 461 bp; double-stranded, linear
gaattcggccaaagaggcctaaattgctggcggatttagaccggtagaaaacccgggatggtttattttgattgagccccctctgggtggcagagaggaggcttgggctctgggccctttacgtttggagaaatggctttatcagctcagttgaaaggtttttccctctagctagtgaaagataaacttggaaatgcaggtttctccagcggttggtggtggggacaggggtcgcctagggaacttgcaggggccgcggcctctgttgtgctcttctggagagtgcactgtttgtggaacttttctagagtggcaaaaacgatctccactgtcggtgaaagggcagttcctgaagtcagctcatggtcctggctccccttctccccagcagtgaactgggggtgacttcctgatctgcccagcacaggagagccccgcaaagcgcctgggaggccctcgag

SEQ ID NO: 1146 - DNA (cDNA), 291 bp; double-stranded, linear
gaattcggccttcatggcctaccattttggattgatttttgtgtatagtgtaagatgaacccaatttccttctttagcatgtgggaattctgtttttctgtcaccctttttttttgagatggggtctcactatgttgcccaggttggccatgaactcctgaggtcatgtgatcctccttcctcagcctcctgagtagctaggactacaggcatgtgccactgtgcctggctccagcaacagttgttgaagagactgttctttatttacttattgtatcctctgtgctcgag

SEQ ID NO: 1147 - DNA (cDNA), 338 bp; double-stranded, linear
gaattcggccttcatggcctacccacctgcccacgccgacttgggaggatggtggcctgcagcggccaagaagccaaaaaaaaaaattttttttttttcagatactgtgcttgatttttggagaggggagaggtggaaattcctaaatggctaatgcactgttccctccagcccgaatgcctcctgccaaaccccttttccctgctgcctctgtccccgcatccttgttctcccctgggtccgaaacattttttccgaggatgaacaggggacatctttaggtttctcaactcttgctttggtgtttgccgcagcatggaaaacaggcacccctcgag

SEQ ID NO: 1148 - DNA (cDNA), 385 bp; double-stranded, linear
gcaggaatcagattcactcattagtaagccgcactcgctgaaggggagagcatgagcaaggcagacgtgagccactgcgcccggcctgaagagtttttgctaattggatattagggaaaaccacaggatggattaagacaagagagggaaggtaaggttctagacagcaggattatgtctgttagttggttttatgtcacttttctagccaagctgtaccatcctgtttttgttggttggtgaatgcttccagctcttttcctccagcccttggaagaggtggtcctataattgttaagcatctagctagggtgatgagtaggaatagcaataagtgacagggaagttgaaggctgcagggctctttgcaggcggcttactcgag

SEQ ID NO: 1149 - DNA (cDNA), 303 bp; double-stranded, linear
gaattcggccttcatggcctagtcacatgaatgagagaattctaaatgcaagaaatgtgcaaaggcacagaaacacagaagagcatgttgtacaacctggctatagtttagattttgtgtgtgtgctatgagagtgtgcgtgtgctgtgagtgtgtgtgtgggcgcacgcacgcatttgtaggaggtagggagaagagtgccggcataacatgaaatgatattggacctcaaatggtatgctaagatgtttgacaattttattctaagcagtgagtttttaaatttagacatgcaatctcgag

SEQ ID NO: 1150 - DNA (cDNA), 419 bp; double-stranded, linear
gaattcggccaaagaggcctaattgaattgtattggtctttttctctttaatattttaggtgctttattatatattaggattattagtccttagtttgtgaaataagctgcaaatattttttccccaatttttcttttgtctctttgctttatttctggtgtttatttttccccaggtgtactgttttctatagccaaattattgatcttttctttaattgcttttttgttcactcaaaggaaggttttcaccactgagaggttataaaataattcactcatatttttactctttttttttgcttatgttaattttttgtttggaacaatctcaaattcacagaagtgttgtgagtacgttgcaaataacttgttttttccttatgcatttcagagtaagttaccagtccgcgctcgag

SEQ ID NO: 1151 - DNA (cDNA), 394 bp; double-stranded, linear
gaattcggccaaagaggcctagcggatggagtctttgacagtgtttttgatctcctgcagacggctgctcaggaagctgttgacccgatccagttcccggtcgggccactccaagagcctctccctggcaggccttggctcccggcttccagaaacacgatttgcctgctttagagcttctgctgccaactgggccttctccttttccttctttttcagcttgtgccgggcccgcttggcggccctggcgctgttggggactttgggctccgtgctgttgatgaattccagcagctcatccacatctcggtggtccacggcgggctccccagggatcccgcccagggtgccccccttcatgggcagctcctctttccgcctggtcagcctcgag

SEQ ID NO: 1152 - DNA (cDNA), 426 bp; double-stranded, linear
gaattcggccaaagagcctactgtgaatcacgaactggctgagggcggctgaccgcttgtagctgttccggccatgcaccataagaaccggccaagatgcttaaattgagtgatggagaagtctgcagccaacgaagcctgttttccttcctttccttccactcccacgccgcagtcagattcctgaatcatgctgacgtcattgcctccgtcccctactgcacaggtgagcttgcccgtgcgctcctgaagcaggcgcacgatctgggccttctgggtgggggcacatcngcagcagactacggccgggcactggcaggccagctccatgaactcgtactcatagtacttgaggcaaacctccagggagtctcccgagatgaccagggcacaatcatgcttcctgcggaaggcgttcagctcgag

SEQ ID NO: 1153 - DNA (cDNA), 270 bp; double-stranded, linear
gaattcggccaaagaggcctaagctgatatttattggacatttgcaccatgccaagcattcggcttggattatcccatttgtttctcacagccggtatttattgtctgctcctctgtgccaggtgctgtgctctgggcaggggcactgcatgggctgcctgccctggtggagcttgtggtctgatgggtgaggctgacccaagcccaccccattgccaacagggccagggcaagagtacacacaggggcctcataccatatgtcctcgag

SEQ ID NO: 1154 - DNA (cDNA), 582 bp; double-stranded, linear
gaattcggccaaagaggcctagctgaaatcattctgaaaactcaaacagtagacttcagcacacaaggaaagccaaagccatttgagggggaataaagccaaaagcctttcaccttattcgttccaagaatctcaccgccccctccttatccccctccaaaaataagccattgcacacagacaggcagcatggctagcaaacgaaaatctacaactccatgcatggttcggacatcacaagtagtagaacaagatgtgcccgaggaagtagacagggccaaagagaaaggaatcggcacaccacagcctgacgtggccaaggacagttgggcagcagaacttgaaaactcttccaaagaaaacgaagtgatagaggtgaaatctatgggggaaagccagtccaaaaaactccaaggtggttatgagtgcaaatactgcccctactccacgcaaaacctgaacgagttcacggagcatgtcgacatgcagcatcccaacgtgattctcaaccccctctacgtgtgtgcagaatgtaacttcacaaccaaaaagtacgactccctatccgaccacagactcgag

SEQ ID NO: 1155 - DNA (cDNA), 279 bp; double-stranded, linear
gaattcggccttcatggcctaggatccgtgagggagaccgcatcatccagattaacggtgtagacgtccagaaccgggaagaggcggtggccatcctgagccaggaagagaacaccaacatctccctgctggtggcccgacctgagagtcagctggcgaaaaggtggaaggacagcgaccgggatgacttcctggatgactttggctctgagaatgagggggagctgcgtgctcgtaaactgaaatcaccccctgcccagcagcccggaaacactcgag

SEQ ID NO: 1156 - DNA (cDNA), 353 bp; double-stranded, linear
gaattcggccaaagaggcctacattgttaatataatttaacagaagttgtgaaactaaaattttctaagattaactggtagttcattgtaaatgaacataatgaacagaatttatgactccactgtggaaaatgctatcaaataactaaggaatatatatggaataagtgtacatatgtaaaatattgttactagagttagatatgtgccaaagtccatttatcccaaatcctgtctgaaaaggaggggtacattggtaaacattttggagtgcttaaaaatgccaaaaacaaaatggtaatttctactttgataaagtaaaaaagttaaatgtgtgtaaaaaagtgctcgag

SEQ ID NO: 1157 - DNA (cDNA), 331 bp; double-stranded, linear
gaattcggccttcatggcctacggtggcctttggggccgaagtgggcgtgcggctcgcgctgttcgcggccttcctggtgacggagctgctccccccgttccagagactcatccagccggaggagatgtggctctaccggaacccctacgtggaggcggagtatttccccaccaagccgatgtttgtgcgtggagaaagatcgtctttcctccctccccatgaccgggcttcccgcgggcacctgtgcgttttccaccccgagacggcctttgtagggacccactgcccactccgctgctgtgcgctgggttccgcctcctagggctcgag

SEQ ID NO: 1158 - DNA (cDNA), 178 bp; double-stranded, linear
gaattcggccttcatggcctaaaaacttagactgacatctagctttgacaatcatagtatgttttattttcctgagggggaataacttataatgctgtttagttttgtactattggtgtgttggtgaatttttaaactgtgtgctaactgcacgattgaattctagacctgcctcgag

SEQ ID NO: 1159 - DNA (cDNA), 401 bp; double-stranded, linear
gaattcggccttcatggcctaagcactttgggatgttgaagtgaggggattgcttgagccctggagttcaagaccaggctgggcaatatcgccagaccccatctcttaaaaaaagtagttctttactgttgcctctattgactcttgaatgcaagaaagaacatttgccctttgacttctaatattatcttatattctctcttcttcaaaagatcagaagcacatgctgtaaacatcaatcatgatcatctttgtctcccttatcagattgtcaaaattatatcttttcctattttcctgcataccttatctttttcctaaattctcagttctccaagttctcagaaatcataacttcagaccttgaaatgatgactctgttccacccccatcgtctcgag

SEQ ID NO: 1160 - DNA (cDNA), 350 bp; double-stranded, linear
ggggggccagacacgcntggggtaagaagggcctggtgggaggagttcacagagcagacggtgcactgggaccaggagagcagaacacaggccataactatagggcaggtggggcaggaacgggttaaaaacgagatccaagccagccagatcgcaggaggtgcgggggcgtcgtcccccttctgttctccccccaaggtcacagtgcatgcaataaaatatatatacaggagctagatccgtcctctgcaggggctctgagggtccagagctcccttcgggtggcgggaagccagtggcgctccctggcggccaggccgggctggagccacatgcgtcggggtctcgag

SEQ ID NO: 1161 - DNA (cDNA), 597 bp; double-stranded, linear
gccccggagcatcttaagagctgagcgcagctgacaactaggggccggaccgtcgcaggaggcgtccgctggataccttcccccttccctgacctagagctctacagctgctgcctcggtactgaccgagggttcccagagctgtctcaccattgcaaaaacgttatagcaacagcctctgattacgacatggctgagatcaccaatatccgacctagctttgatgtgtcaccggtggtggccggcctcatcggggcctctgtgctggtggtgtgtgtctcggtgaccgtctttgtctggtcatgctgccaccagcaggcagagaagaagcacaagaacccaccatacaagtttattcacatgctcaaaggcatcagcatatacccagagaccctcagcaacaagaagaaaatcatcaaagtgcggagagacaaagatggtcctgggagggaaggtggacgtaggaacctgttggtggacgcagcagaggctggcctgctaagccgagacaaagatcccagggggcctagctctggatcttgtatagaccaattacccatcaaaatggactatggggaagaactaaggaacctcgag

SEQ ID NO: 1162 - DNA (cDNA), 476 bp; double-stranded, linear
gaattcggccttcatggcctagaaataacttaaaatcctgaatcagatgtttctccgtacatggcctatccagatcaccgtagggtgaagctcaaagtcagcaagcctcacccacatactcagagcttcctttcagtgttgagaccttcttccctctgagcagatgacaaaggagtttgaaaccagcctggccaacatggtgaagccccgtctctactaaaaacacaaaaattagctgaaatggtgactgtaatcccagctactcaggaggctgaggcaggagaatcgcttgaatccgggaggcggaggttgcagtgagctgagatcgtgccatttcattccagcctgggcaacagagcaagccatcacagatttgggagcaaccaagaaagccagggacagggtatgcttggtaacctggcaagagctgacaaaggggaaaaataaaaccccacagaaagagcagggaactcgag

SEQ ID NO: 1163 - DNA (cDNA), 482 bp; double-stranded, linear
gaattcggccaaagaggcctagatgaacatgaacctgcgggagctgtacctggcggacaacaagctcaacggcctgcaggactcggcccagctgggtaacctgctcaagttcaactgctccctgcagatcctggacctccggaacaaccacgtgctagactcgggtctggcctacatctgcgagggcctcaaggagcagaggaaggggctggtgaccctggtgctgtggaacaaccagctcacgcacacaggcatggccttcctgggcatgacactgccgcacactcagagcctggagacgctgaacctgggccacaaccccatcgggaacgagggtgtgcggcacctcaagaacgggctcatcagcaaccgcagcgtgctgcgcctcgggctggcctccaccaagctcacgtgcgagggcgcggtggcggtggcggagttcatcgctgagagcccccgcctcctgagactgaaccctcgag

SEQ ID NO: 1164 - DNA (cDNA), 494 bp; double-stranded, linear
gaattcngccaaagaggcctaaggagcgctgttaaagctgatacattcctgtgggtcaactatgcaactaactcagattttgagcaaacaaagctctcaagttggtgatcctcaggagtctctgcattagttggacagctcttctggaattatcttctaagtcaactgtgggttgggtaggtggctctgctgatttttcgctggacttccacatttgggaccagttggctgtnatcagctctagaaagggtgtggctgttttacattggctgttttcctcacattcctcaagcaggtactgtaataaagaactggagaaatacagtcagatgggaagtagcccctgctgtcaaggagcttgccatctaatgggggagacaggcaagtaaaccaaagactacacagtgcagtatggtaagtgccatgattttgatgtgacagggcacagtggacgaccttccaaatcaaagcaagtaactaggggcagactcgag

SEQ ID NO: 1165 - DNA (cDNA), 298 bp; double-stranded, linear
gaattcggccttcatggcctaactcttatctgtgaacacaacttttcagcactacaaatgcaagcaactgcgcagtcacagttggggctgctaatttggaaatccagtttaggctgatttgaaaagacaacagcatttttgcaatcactggtgtatcctttacgagagagctagtcatgccattttttgttttctgaagacggcctttttttcttttttattattattatttttttaaatttgggatcttgcctaattctttagtacaaagcctggccctaaaaccgtagagctcgag

SEQ ID NO: 1166 - DNA (cDNA), 266 bp; double-stranded, linear
gaattcggccttcatggcctagatagaaaagaatattccaagtgtatgaagtatagaggtggggaagttcagggtagagaagtantagcaggaatagaatatagggggacagaaaaatagagtggagccagattcagagaactttnagaagcaggtaaagaagtttaggattaatggacaagtcattgggtctccaggtttctttgagggagagtgatatctgagctctgttttagaaagattaatctgaaaggaggtaactcgag

SEQ ID NO: 1167 - DNA (cDNA), 499 bp; double-stranded, linear
gaattcggccttcatggcctaggtaaataatgccaagttactggggtctagaaagaaagttttctcttggatcaagagagtgtgagtttcctaagtttcttcagcagggatgttggtcctttagttaggaggtttaaaatcaccaggaagtaagggtgaggaagaaagtctgggtccatgtttgagaaggtgactgatggtggtggaagtccttcctgtgatgagttaatgatgcgtatttctgataaagatgggaagttatttacatcgacattaaccaaatctacccttcatgcagaaagaaagagctcttgggccattctctattaatgaaaccataccagggtcaatattacagtgtctctgaaatacactgaaaatacttccctggctcaggtggtggcccatgctacctccaggcagttctacttgattaatgatgcaatggagataatcctattgcatccaccatcaaggagagttgggcagtcaactcgag

SEQ ID NO: 1168 - DNA (cDNA), 425 bp; double-stranded, linear
gaattcggccttcatggcctacacaaacaaacccagaatactctattactgtatttgtggggtacaatccactcaactctattatgaagcccaaaaaataaatctgttaaaaacaataatagctacaccaacctgttaagagataggtaatataaaaatatatagtttgagacaactaaatcaaaatggaggaggggatagagttcaagaagtagaatttttttgcgtgtgcttttcttggcctttgtttgcttctattcttttatttggaatcaaagataagttatcaactctttaaaataacttgttatatgtataagatgttttctgtaagcctcatggtaaccacagtacaaaaacctatagtacaattcctaaaaataaaatacaaaaaaattaaaatatactaccagagagctctcgag

SEQ ID NO: 1169 - DNA (cDNA), 318 bp; double-stranded, linear
gaattcggccttcatggcctaaaaggtttgatcttgtaatgtgtcactgtgtttccttagtggccagccagccttcagaatagctaaaggccttccttccttccagtcagcctgagagagaacacctgtcccctaagcacctggtgtctccattggaggcagactgctctcaggagactactagaagcttcagcccggaagacaggctgctctctcatgctggtggcccaaattgagaaagtggtgtcccttcctgattttgccaccagccctaccgaatagttgtaaaccagtatcaggaattgggatcctctcgag

SEQ ID NO: 1170 - DNA (cDNA), 346 bp; double-stranded, linear
gaattcggccttcatggcctacattggtcgttttattgccatggcactatttcatggaaagtttatcgatactggtttctctttaccattctacaagcgtatgttaagtaaaaaacttactattaaggatttggaatctattgatactgaattttataactcccttatctggataagagataacaacattgaagaatgtggcttagaaatgtacttttctgttgacatggagattttgggaaaagttacttcacatgacctgaagttgggaggttccaatattctggtgactgaggagaacaaagatgaatatattggtttaatgacagaacggcgttcgctcgag

SEQ ID NO: 1171 - DNA (cDNA), 240 bp; double-stranded, linear
gaattcggccttcatggcctacactttattcccttttaagtctggtaaagaatgaatacttggacgttttgtttcatgcagatttagttagcaactcgattatcaaatggtagaatatctgtatgcactgaagccaaattctcagtaactcagcttttgntagtcatatgaggatgatgaataataggantccagagcagttaacaaattgatacaagtggtaggaaaatttgatatgaa

SEQ ID NO: 1172 - DNA (cDNA), 277 bp; double-stranded, linear
gaattcggccttcatggcctagtttcntttttgtatctctactgatatcaccaggatagtntactctccttctagctttctgcttaccgcacactggataacacacacatacacacccacaaaaatgctcatgaacccaatccggagaaggttccagcaggtcccccaccctcccctcctcctcctacttctcctcttgacagcgaggacaggagggggacaaggggacacctgggcagacccgccggctctccccccaccccacccccatctcgag

SEQ ID NO: 1173 - DNA (cDNA), 258 bp; double-stranded, linear
gaattcggccttcatggcctagaaaagtctagaaaatagcttaaataacaaacacgtgtggatttgttagaccaagagcaagggagaccatttaatgcagttatttaacaatatttagtactttcctttaccttgtctgctgtgccatcattcatgcctgtcagtgttaaaaatccccaaatttcccaaacagattttcatttcacttccgtcaacttttaaattaaagtttttaaattcctgtccccactcctcgag

SEQ ID NO: 1174 - DNA (cDNA), 334 bp; double-stranded, linear
gaaagttgcttttgatgtcaaaatggaaaatgaaaagttagttttagcatgtgaagatgtgaggcatcagttagaagaatgtcttgctggtaacaatcagctttctctggaaaaaaacactattgtggagactctaaaaatggaaaaaggagagatagaggcagaattgtgttgggctaaaaagaggctgttggaagaagcaaacaagtatgagaaaaccattgaagaatgtcttgctggtaacaatcagctttctctggaaaaaaacactattgtggagactctaaaaatggaaaaaggagagatagaggcagaattgtgtcggccactcgag

SEQ ID NO: 1175 - DNA (cDNA), 403 bp; double-stranded, linear
gaattcggccttcatggcctagtgcttgaactcacgcatctgttttacctgcatctgcaggcgatggggcaggggccacggaaagagtctgagggctgcttggtgtagtcaggttgtgtccaggcatgcggagctgtgagtgcctgcaggagagacacccaggaggagtttttacattttggtctaaaaagctcttggattcatctcatctcatggaatgatcctgtcggatgacgctgacgtgattgcttcagacttagaggtgaataaattgaggtccagagaggtcacagtcacgaagctcatggtagactgaggccactaaacacccgtctcctgattttcagtggcgtcctcatttgcatacacctgggccatcttggtttttgcaagaaaactcgag

SEQ ID NO: 1176 - DNA (cDNA), 590 bp; double-stranded, linear
gaattcggccttcatggcctaggtaccttgaacatggctgtaaattaatctttaactgccttggtggagtcttcctgatttattgaagagaataatcacgaaaataatttttgtttgttttttgagacggagtctcgctctgtcaaccaggctggagtgcagtgccacgatctcggctcactgcagcctctgcctcccaggttcaagtgattctcctgattgagcctcctgaatagctgggattataggtgtgcactaccatgaccagctaatttttgtatttttagtagagatggtgtttcaccatgttggaccgggctggtctcgaactcctgacctcaggtgatctgccctcctcagcttcccaaagtgttgggattacaggcatgagccaccgcacctgacataaatatttaatgtaataccgtgtaagacttttccattgggttttgagaaacacgttaatgagagaaattgcttaacattggagaggattgcagagaatattgactaatatggtggggtgaggaggaacaacatcaattaagattcagatttattatttaaaaaaactaaaaggcggcctcgag

SEQ ID NO: 1177 - DNA (cDNA), 562 bp; double-stranded, linear
ctcgaggtagccacagtcctgatcctagtgacaaatgggggcatgtgtctacatccgggtcggcggagggctcatttcatctggcctggggggaaatgagtattaatttgtttacacagacgtaaacacagcccaaaacgcatcagcacgttgactcaaacgcccgcaacgccagggcaaaggcaatttggttaacagggggaagcgaacagacggagacgcctggagacccaggtgccacaacccggttaatcgcggtgcaaataagggcaagtcccctccccttgtccgtgtggtcttgacaacgacactagttcattctactaacaaggcgggcggggggtcagatgggccacacacacccattttcctcaacgggaccccaacgcgatctcagccttgctgtgctactttagggcaagacgcgttccccattcggaagccgcaggaaagcgcggcgagagcgggttagccctcggagcggctaagagcctcggaatagcgcagaggaagtccccacccctctcggggctgggagccctaggccatgaaggccgaattc

SEQ ID NO: 1178 - DNA (cDNA), 339 bp; double-stranded, linear
gaattcggccttcatggcctagaagcacaggtaaaacaagctggggcttatggtcagcattggaagcagggagcagagtggggaaaacagcagtcttatgggactgagtcctcaatctgtgtgatctgactctatctgcaaggtagtgttggaagtgaacagggttggagaatgcccagctggtgtccaccgcagaattgatttcatgtttggtatgcagggaccccccactccacacttagtcacagaaatctgtgttgattgttgtggcatgaaagcagggaaaaatagtttgtttttttctccacacttccttcccaagatcccggctaactcgag

SEQ ID NO: 1179 - DNA (cDNA), 353 bp; double-stranded, linear
gaattcggccttcatggcctactcaccggagaaaagaagtttcngaagaaaaccacaaccatgccaatgaacgaatgctatttcatgggtctccttttgtgaatgcaattatccacaaaggctttgatgaaaggcatgcgtacataggtggtatgtttggagctggcatttattttgctgaaaactcttccaaaagcaatcaatatgtatatggaattggaggaggtactgggtgtccagttcacaaagacagatcttgttacatttgccacaggcagctgctcttttgccgggtaaccttgggaaagtctttcctgcagttcagtgcaatgaaaatggcacatctcctcgag

SEQ ID NO: 1180 - DNA (cDNA), 296 bp; double-stranded, linear
gaattcggccaaagaggcctacagagtgctgtgcttaagttttacttctttccacctttaaatctctgataagtttctttttatctaaaggttccactttgttcattactttttgtttccttattattgatttgttcgagaacctgagtttcttgacctgtgtgattttgtaccacctggactttctgactgtgtttgcccaggctggagagcagtggtgggatcatagcttactggactcaagccatcctcccgcctcagcctcccaagtaactgggactatgggcacactcgag

SEQ ID NO: 1181 - DNA (cDNA), 277 bp; double-stranded, linear
gaattcggccttcatggcctacttgagttgtacattagatctttaaacttgttagtcctacatatctgctattttttatcctttgacctacattttcccatttcctcccagtgttctctccccaggtaatcattgttttattccctttctctgtaaatttgacttttttttttggattccacatataagtgagatcatgatcatgcggtatttttctttctgtgtctggcttatttcacatagtattatgtcctccaagtctacccacgaactcgag

SEQ ID NO: 1182 - DNA (cDNA), 192 bp; double-stranded, linear
gaattcggccttcatggcctagagatactggctggcaattcttggcgttccttggcttgtagctgtaagatgcgctctaatatcagtctctgttgtcatttgccttttctctgtgtctgtgttcaaatgtcctttttttttttttttttagggagtcttgctctgttgcccactcaaactgctgggctcgag

SEQ ID NO: 1183 - DNA (cDNA), 296 bp; double-stranded, linear
gaattcngccaaagaggcctagtaaatagttgttctgttacattgtttagagaataatgacaagaacaaaaatctgtgtgttcagtatagacacaaccatccttttcttttttttttttttgagacagagtctcgctcttgttgcccaggctggagtgcaagggtgcgatctcagctcaccgcaacctccgcctcccgggttcaagcaattctcctgcctcagccccccgagtagctgggatcacaggcatgtgccaccacgcccggctctttttgtatttttagtagaactcgag

SEQ ID NO: 1184 - DNA (cDNA), 234 bp; double-stranded, linear
gaattcggactactacaggtgatactacagtgactactacagtaattcggactactacaggtggctaattcggattactacaggtggacataattcggactactacaggtaattcggactactacaggtgagctaattcggactactacaggtggacataattcggactactacaggtgcacctgtagtggagaacatttagcaatgataaagccgctgctgatccttctcgag

SEQ ID NO: 1185 - DNA (cDNA), 300 bp; double-stranded, linear
gaattcggccaaagaggcctagaacagtttagaaacaatttccctgcctttgctttgggttccctgtgattgttctccacactgttttcctggctctatctgtctcccttgccacggccactcaagcctagctgcccaacagctccttccctgaagaaccccggccttcaggcttgacaggtgatctcatccctcttcttttcctccaggttgttgtagacttccaccttcccttcttctcctggtcctttcccctttctagtgccaatgtgggccacgctttcatcccacctactcgag

SEQ ID NO: 1186 - DNA (cDNA), 324 bp; double-stranded, linear
gaattcggccttcatggcctagtgatgagccctcctcttcagctaggaaaatgacggtgttcagaaagttaaaacttcttcgctggaaggatttcatcttaaagttgggagactggaagaaattaaagtgttctaaatggaagagcattcaccacatgtgttctgttttgggttgacatttagcttttgtttttattttagaaacggaagactctggtagcagtccttgaaatcttgatgccattgctattttctgcattgtattgtatcttcgttttagtagtgctccaataaaaagacctgctactagctgcaaaactcgag

SEQ ID NO: 1187 - DNA (cDNA), 308 bp; double-stranded, linear
gaattcggccttcatggcctagtacgttgctgaaaagaagtttattgctattttcttattttattatacaaaactagatttgcttaaaacatttcccagtctctttaaaggaatgctagttagtgggaggccacagctagtaaattaccctcagtagtggtttcaagtagtccataactataaaaatcgttacggccaggatatgccggaacagaacactccccactggggtcctcagccttggatgtcagctcggcccctcaaggggtccctacacctggaagctgattccactcatcagtctcgag

SEQ ID NO: 1188 - DNA (cDNA), 251 bp; double-stranded, linear
gaattcggccttcatggcctagaatgaagaaggttcccaagaagttagaggagattcccccagcctctccggagatggcacagatgaggaagcagtgcctggactatcattaccaggagatgcaggctctgaaggaggtcttcaaggagtatttgattgaactgtttttcttgcaacactttcaagggaacatgatggatttcttagctttcaagaagaaacattatgccccattacaagcaccactcgag

SEQ ID NO: 1189 - DNA (cDNA), 359 bp; double-stranded, linear
gaattcggccttcatggcctaaggagttggaaattgtgcacaaagaaaggtggtgaataagtaaagtcgtaaattcaagaccacaacagaaagcttcactgcagacactggacttgaaccaccattgaaaacagtcaggatttggagatgataattaggaggatgtgtattctagctgtggaatttattgtgggcaagcataggaatgagaaagtacaatgaaaaaatgtaagtagacccaccaagttagagaagaaggtcctggttaagaaaaatgaaagatttttttgaacaacagattaatgtgatgaaatagatgttcaagagtgaagataagttgaagatagggacccctcgag

SEQ ID NO: 1190 - DNA (cDNA), 245 bp; double-stranded, linear
gttgttaggctggtgttgttatgttgctgttgttatgctggtcgtgctgctccatgttctccaggtgttcttcccttttatcgtcacagttaccccgtacacctgacaactggacatctgcgcctggggtcttcagcctaaacacacctaaaccctccaccaaacccctctgcttccgcctccccgtgtctgtgagcgcctccactgcccatccctctgctcaggccccatttccagggctcgag

SEQ ID NO: 1191 - DNA (cDNA), 257 bp; double-stranded, linear
gaattcggccttcatggcctagtctcaaaaaaaaaaaaaaaaaatagtgttcagcaaggttgaagcataaaaggttaatagccagaatcatttatcaattgtatttctatacatctacaagacacaatctgaaaatgaaattagagaaacaatttcactgggcaacaagagcaaaacttcatctcaaaataatcatcatcatcatcatcatcatcatcatcatcatctacaatgtcatttcccatccaacgctcgag

SEQ ID NO: 1192 - DNA (cDNA), 748 bp; double-stranded, linear
gaattcggccttcatggcctaaggacatggcagagttcctgctaaaagagaagacagttatttaaggaggtttgagattcaagggcttttttaattttaaaattaaccatggtagaaacctgtgtgttaatatgctgagggaagttgccaatagtgagatgaaagatctaggcaaggggatagcaaggtgactgcaccagatacctggatctgggcaggaataaacctcaacagtgatcatgttgaccttgagtgacagggtataatgtttgggaaggtgctttgtaaactataaggggcaatacaaacatgtagtacaccttctctgagatccgggaaaggacaacctgagcataggttggggctggtcataggccactctcccctactgtttctctagagtgtgtgtagtccctagcaagtctcagatgcctcgaccttcatggcctagagagttctcatcagaacaggaaggcagtgatgatccattgcatgggcaggattgttctacgaagacgaagatctccggaaagtgaagaagacccggaggaaactaacctcaacctctgccatcacaaggcaacctaacatcaaacagaagtttgtggccctcctgaagcggtttaaagtttcagatgaggtgggctttgggctggagcatgtgtcccgcgagcagatccgggaagtggaagaggacttggatgaattgtatgacagtctggagatgtacaaccccagtcgactcgag

SEQ ID NO: 1193 - DNA (cDNA), 227 bp; double-stranded, linear
gaattgcgaacatggcagcgcgttggcggttttggtgtgtctctgtgaccatggtggtggcgctgctcatcgtttgcgacgttccctcagcctctgcccaaagaaagaaggagatggtgttatctgaaaaggttagtcagctgatggaatggactaacaaaagacctgtaataagaatgaatggagacaagttccgtcgccttgtgaaagccccacctaatctcgag

SEQ ID NO: 1194 - DNA (cDNA), 258 bp; double-stranded, linear
gaattcggccttcatggcctagtatatatataaaatactgaggatttagggctgatgtatataaataaaatactgataacttttttcctttctttttcttttttttttgagatagtgtcatgctctgttgcccaggctggagtacagtggcaccaaaccgctaactgcagccttgccctcccaggctcaagcaatcctcctgcctcagcaccctcaataactgggaccacaattgcatgccaccaaacgcacctcgag

SEQ ID NO: 1195 - DNA (cDNA), 314 bp; double-stranded, linear
gaattcggccttcatggcctaatgaattctcatttcctggaggctgaagatctgtgcaggtgtctgtggccaatgttaagcctacgactttagatgagctggcataaatcttgggagagttttcttgtctgtgttccctctgaatttctctgtgctgttagaggcagggacagaagagaaccagcatggcagtgctgggctcagggtgatgcctgcctgccagcacagcggttcttgtccctgtcccacattgcttcttggaagcctttttacagcctcaatcatcttgctttttctaccgcagctatctcgag

SEQ ID NO: 1196 - DNA (cDNA), 385 bp; double-stranded, linear
gaattcggccttcatgcggggacttccactctttctcgttttctcggagctccgcctccagctcctctatcttcctcttcagctgcgtgttcttctcctctctgtggatctcacggcctcttcctctgctccacgctggccaccgactcctgcagcgccgtgggcagccgggcgtcgctctcccgccgggtctgcagctccatctcccacctcttcccgtgggcagctctctgcgtcgaggccgccttcagcttgtggttcccagactgcaggtgcgtgtcagctgcagcggcctgagaggcctttcatcgtccgtcccgttgacactggatgccggagtagaagatggggctccatgcccggattctcgggattattactcgag

SEQ ID NO: 1197 - DNA (cDNA), 256 bp; double-stranded, linear
gaatttgcagtgaaccgagattgtgccattgcactccagcctgggcaaaagagcaagactccatttcaaaaaaaaatcttaaaaatacgaagtttttcatttttcttaaattttcattgtgactactttagtagacttgccagtaataagccagttaccgcttgaatctcagtttctttatctggaaagtggtcattatttatctgctgtccccttacctagagggaatcaaatgcgtttgatacaggttctcgag

SEQ ID NO: 1198 - DNA (cDNA), 446 bp; double-stranded, linear
gaattcggccttcatggcctagagagcccatctccatctgccagcctggaagcagccatggcaaatgggatgtgtcccactgcccccgtttggtgccacagttgggtttattctcacagctgcaaacccacgtgctgggctgcacagctgcctgaacgaagctggagcgtgcagaacaaactgcatggaatgtcacgtggggttttccactctcgcccacagtgagttggcaatgcctggccacgtgtgctctgtggtctttgaacttgatctgggaggacagaanttcaaaaggaagatgaaggccccagcaagggaggtattcctgtcttgagcagaaggtaaaggtagaaggtgcagattaggtactgggaatagtcatggtttggtttgaatggagtagaagattccagaggaagagcagtggggcacagtggctcctcgag

SEQ ID NO: 1199 - DNA (cDNA), 369 bp; double-stranded, linear
gaattcgccttcatggcctaaattgtagctaggaaaataatatatgtcttagtttaagaactcatactctggaatcaactcattgcactttcctatatgtttggccatgggcaaagcacataacctcttaatcaattggctcgtctccaaggtgaggatagttatacttaatcctctttaggagtgagaataaaaattaaatatgtgtgtagcatagtgtctacaatgttagaggtatttgaaaagtgatagtttattttttggaattatttagcattattaaaaacaagggggagcacacggtggcacgtttctggtcccagctacttgggaagctgaggtagtaggatcgcttgagatccgctcgag

SEQ ID NO: 1200 - DNA (cDNA), 483 bp; double-stranded, linear
gaattcggccttcatggcctagacaggttgctagctacatgggtctctgaagaagagttttccagcagaaggagcaactagtgcaaagcccctgagacacaactgcacctatccagattaaggaccacggaggaagccactgtaggagcacaaaaaaagtaggagatgaacagagaggtgagggaggctccgtaggtcctagtatgcactttggcatttatttactgattgagatggcaggtcattggaggattcggagcagaggaaggatataatctgacattttagcaggatccctttgagtaagttagctgcgtagacctaagatgaacaaggacagccacagcaagacctgtaaggagactatccttgtaatccaggcaagagatgatggcagcttggaccagggtagtagcagtggaattgatgagaagtggttgaaatctggatatattttgaagatggagcccatggggtctcgag

SEQ ID NO: 1201 - DNA (cDNA), 192 bp; double-stranded, linear
accatataatttgccacttgaagtgtacaaattcagtgacttttagtaaattcacagttatatattcattaggatattcagagttatatattcatcaccacagtcactcttagaacattttaataacctcaaaaagaaaccatgcactccttagccatcactcctaacccaactctccctctaccgctcgag

SEQ ID NO: 1202 - DNA (cDNA), 281 bp; double-stranded, linear
gaattcggccttcatggcctactttaaacatgtggtcttactgcctgcaaacacatacagactcttaatttttatttacatagatgtaaatatacacatatattactctaaagataaaccttaagggtaagaaaattataaagtatgtgtgtttntgtgaatatgaatttgtacctatattcagaagaaaagagcaatattggcacaaaacaaatcatcttaataaggtaactaattggntgngtgcagtggctcacgcctgtaatcgcatcacactcgag

SEQ ID NO: 1203 - DNA (cDNA), 328 bp; double-stranded, linear
gaattcggccttcatggcctagtgatctacttaggtagctcctggaaagcaaaggagagagagcaagacctgtacagactttgtttatgaggaaagctatataaggattataagaactgataaatatttctttgtttcctttttgacaaaatggattttcttcagtttcttaagcagatgtattatttctgggacgttttagccatgtagtttctttttattcctctttgataccctgaataactagccttagaaacacaagtaaagctcccaaaatttcattttctacatattttattaccagattgaattctagacctgcctcgag

SEQ ID NO: 1204 - DNA (cDNA), 307 bp; double-stranded, linear
gaattcggccttcatggcntaggtcctaaaaagagtaaaaggtgaaaacactaagtgatattcnaaacaaaagaaaaagatgaaaaataagaaccttggttaaagagcagtcgaaataagtaatgattatagctatgatttatatagcacttnttacaagaagccaggcgctgttttaaacacttgacatacttatttgctcatttcataattgtaacaaccctatcagataggtactatttttatcccactttacagaggagaaactgaggcacagaattttaagtgatttggccgggtgctcgag

SEQ ID NO: 1205 - DNA (cDNA), 425 bp; double-stranded, linear
gaattcggccttcatggcctaaaaaaaaatgtagtctagaaagagactaggaatagaacactgctgacttgttcttataccaagagctggaggcataaacagttttaataaaaaagaatactttgtatcttttgatgtaacttccctttagagattctgtttcccctgtcttaaattgtcaggctatttctgattgctgtttaaataattggtagttactatttgagtcangcttcttaaaaaaaaaaagatataaaaattcgccagctcagctttcatttaattagtatcaaagaaatgatatctgtggcagtgaacattagtagcttgttccagggtttattgtaggtttgttcaagtcagtactgcccatcttggcacttaggttcttggaatacagaggtggataaggtttgcccctcgag

SEQ ID NO: 1206 - DNA (cDNA), 504 bp; double-stranded, linear
gaattcggccttcatggcctaagaccagcaccatcgtgagcaagattcctgctgcgctgcttccaaaatggaaaagcatcacaactaaatacctaatatcctaccaaacaaaccacagtccctacgtagccctacttcagtcccaggagaaggaatccatgaatgggctgaggttccgagggtaggttgtggatgtctttctctagaggggtcccacacctggaaaagaggacacccagcccgngggatgagggaagctgggcaagggagaaagttgttgagtcacactggggaccccagatgtagtgagctcagcaagaaaagccaggtccagagagagtcgcacagaattcctgactcacagcgcccctcggtccacagtggagaggaggaggaggaggagcagaaggagggggaggagctgcaggaggaggaggatttgaaagcgctttggccttgtgttatgttttgcttcttttctgtgcccccctctaggccatgaag

SEQ ID NO: 1207 - DNA (cDNA), 242 bp; double-stranded, linear
gaaatttttcagtaactcagtgtctttaactaataatttaatcattctagtaagaaaacatgctttgtatgattttagtctttacatttattaatttatgtaaattaatatgtgggttttatgatcacccacgacattgtcctaacttgtcgactgttctgtgtgctcttttaaagaaggtagtctgttggccgggtgcggtggcttacgcctataatcccagcacttcggacaggctcgag

SEQ ID NO: 1208 - DNA (cDNA), 152 bp; double-stranded, linear
gtagaattgtacagtgcttatgagttatgcatgtgttcctggtctttgttctaggatttttttttttttttgattgctgctccagttgccttacttactttgacattggagttgaccacatgatggtgttccacacttcccctaggctcgag

SEQ ID NO: 1209 - DNA (cDNA), 317 bp; double-stranded, linear
gaattcggccttcatggcctactacccctttatcattcactaacgtgaatgtggtgctaatttttccagtccatatctttgaactttttgtaatatatgcacatcaataagcaatcgagttttatctattctaattgttttaatgtacaactttatgggtacatgtgcaattttgtttcttgcatggtggccaaatcagggcttttagaacatccaacatgcgaataatgtacattgtacccattaactaatttctcaatacttctgagtcttccttgtctatgattccactctctacatcacatgtacacctcgag

SEQ ID NO: 1210 - DNA (cDNA), 282 bp; double-stranded, linear
gacagatttcattaccttgaagttcactgcactgaacaattctcactctggatgtattcctgctctaggatgtgaatttagacttttgtaatagagtgggctttgagaaatagcttttctgctcattttagtttcatgatgactgcatggaatgttttgcttcacgcttatgcattgagttttatcaagcattaagcagttggccgaaacaggtaatacttgaacattcagtccaagaaaaacaaaatggatttgaacatacgtagaatcagtaaactcgag

SEQ ID NO: 1211 - DNA (cDNA), 482 bp; double-stranded, linear
gaattcggccttcatggcctagtcaaaccctagagcaatgcaggccttgttacagattcagcagggtttacagacattagcaacggaagccccgggcctcatcccagggtttactcctggcttgggggcattaggaagcactggaggctcttcgggaactaatggatctaacgccacacctagtgaaaacacaagtcccacagcaggaaccactgaacctggacatcagcagtttattcagcagatgcttcaggctcttgctggagtaaatcctcagctacagaatccagaagtcagatttcagcaacaactggaacaactcagtgcaatgggatttttgaaccgtgaagcaaacttgcaagctctaatagcaacaggaggtgatatcaatgcagctattgaaaggttactgggctcccagccatcatagcagcatttctgtatcttgaaaaaatgtaatttatttttgataacggctcgag

SEQ ID NO: 1212 - DNA (cDNA), 343 bp; double-stranded, linear
gaattcggccttcatggcctagggtgatatttaactcgttgccaatggctaagctccagactttgcctctcacacttggagggattccctgccaccataaatctcgaacttttctagagcaccacattgtttcccagttaggtaagatctcattattccaggtgagcacagcgtttccaatgctttcctcgactctgcatctttcttccagctgcttcttccttcgctgggcttctttcagctctcgctttttggcctgaaccaccatttcttcatactgctgtctgtgcttctgagcttcttcagctggttttgctgggagatttgctggtctgtcctcgag

SEQ ID NO: 1213 - DNA (cDNA), 285 bp; double-stranded, linear
gaattcggccttcatggcctagagaaactaaaactcagagaagttaattactgaactcaagatcccaaagtgctgggattgcaggcgtgagccaccgcgcctggctgaaagagcttttttaatgtattatttatttgtgtcaggatagactcattgatgcgtgttttattcagtgggttataattctttattatgtattctgatgttggtgttttcccagttttagccaatggcatccccttccatctggatcctgtgttcttttgacatggctccaatctcgag

SEQ ID NO: 1214 - DNA (cDNA), 320 bp; double-stranded, linear
gaattcggccttcatggcctagaaccaggccttccagtacgagtttggagccatgtatgcatggatgctgtgtgtcttcactgtcatcgtggcctacagcatcacttgtcccatcatcgcgccatttggcctcatctacatcctgctcaagcacatggtggaccggcacaacctctacttcgtctacctcccagccaagctggagaaggggatccactttgccgctgtgaaccaggccttggcagcccccatcctgtgcctcttctggctctacttcttttccttcctgcgcctgggtatgaaggcccccgtcactcgag

SEQ ID NO: 1215 - DNA (cDNA), 446 bp; double-stranded, linear
gaattcggccttcattttgaaagatatttttgtaaaaatctgtttgttttcttttaatactttccagtgttatctgggtttcttaatttctgacttaaggtctgtaataatttctgctttcattcctcttaatatattgtgtctttctttgtctacatttaagattttatctttatcacgtgttttgaaaagttttattttgatgtgctctttatgtttttctttatttgtagtgcttggaccttgtggtgcttttcttatttataattttcatcaaatttggggggtttgaccattattgcttcaaaaataatctctgttctctttcttcactttctccagttacatactgtagagtaaatgatagctaccgaagacagagtgatccgtgataaatatcattaatgcctctgaagaggagaatgactccagtggaaccactcgag

SEQ ID NO: 1216 - DNA (cDNA), 263 bp; double-stranded, linear
ggactttttggagaagcagtactattcattaattaagtatagagtgtcttgttaatcctaaaagaaagagagccttaatgaggatcatgaatttttttttttttttttttttttgggatggagtttcgctcttgtcgcctaggctggagtggggtgctatctctgctcaccacaacctcagcttcctgggttcaagcgattctcctgcctctgtctcccgagtagctgggattacagacatacgccgccatgcccaactcgag

SEQ ID NO: 1217 - DNA (cDNA), 325 bp; double-stranded, linear
gaattcggccttcatggcctaaacaacaacaataacaacaacaaaaacatgtataactgggaaaaaactgaaagagaatgcaggatcataaaaatatagcaaacaaagtgagtgggatttaaaattagtggaataagaaataatgggtaacaatgaagaacataatttaggtaatagtatagtatcttgggagccctcctggaagtatctagttatggacagtgagcagcagaaacaggatgtaactcaattcagcatacttgatggttgtggtaaccctagaaaatgactccaggaaataggtgagaatccaatctatctcgag

SEQ ID NO: 1218 - DNA (cDNA), 293 bp; double-stranded, linear
gaattcggccttcatggcctacagagatagggtcccatccaggttcctaactgggtggcacatgcatgggctagatccaaatagcattgcaaaggcctggaaaacagaactagaattgaaaccaccgcggaagactcattcgaactcgtgggctgaactcaaccaggtcaatgcttcagaaaaataccagcattctccacaggacataaacaagattgtctcataacataccattcaaaatattaggatacaatccaaaattgctcatcataagaagacaggaaaaactcgag

SEQ ID NO: 1219 - DNA (cDNA), 265 bp; double-stranded, linear
gaattcggccttcatggcctacgaggattggggtaggtatgngctttnggctcatgtttgtgatgataactgaagtctnttgtgggtccgacctgttgtagggtgtgggggaaagtgaaggaagagaatgaaggtgagtccccgccgttgcaaaccttcaccaaaccacgcggcccagttttcgtgagtacccctgtgtcccagagaggaggacccagcgtcctcggctctgccgcaggccttcttggtctggtgggtactcgag

SEQ ID NO: 1220 - DNA (cDNA), 266 bp; double-stranded, linear
gaattcggccttcatggcctaaggaattgaaacccagtactttgcagaacttcttatgacttctggagtggtcctctgtgaaggggtcaaatggttgtcatttcatagcggttacgactttggctacttaatcaaaatcctaaccaactctaacttgcctgaagaagaacttgacttctttgagatccttcgattgttttttcctgtcatttatgatgtgaagtacctcatgaagagctgcaaaaatctcaaagggggatctcgag

SEQ ID NO: 1221 - DNA (cDNA), 312 bp; double-stranded, linear
gaattcggccttcatggcctagctcattctgctgggggtagagatgaggggagggagtaagttaaaccttggactagcaagtagaagcctggggggatgcgtgtgcctcagtttcctcctccacaactgaatatagtggctgaaaactggggagatacttgatggcgcgaatgtccgttttctctcccttcccacctcctgcaggaagcaggacggggcaggcagcacctggtaggcacagtgctttgcccctcctccccttcccttctggaagtcttggggcctcagtgcttgcaacagccactcctcgag

SEQ ID NO: 1222 - DNA (cDNA), 512 bp; double-stranded, linear
gcgattgaattctagacctgctggcctcaagtgaacctcccgcctcggcctcccaacgtgctggtattacgggcatgagtcattgtgcccagtcacagaattcattttatttgtgaaaatacagtggtacaagtaggcctttgttaaatgactaacctgaaacctcttgtgaatgacaaactcctctctactccaaatactggcccatccctgcttaaatactgctcaatgaagttactcatgctagttcttgagggagtaactctagaatgattccatctaggaagacataagataaaatggtaagtattctaagttctataggtagtttagtcatgccatattataaacctccactccaaaaatagtgtgaggtcatttctggccagagtgaaataaaaaatgtataatgcctgaacagtctattattctgacaatgaaaaagattaatgcagttccctttatcacttgcatgagtaaaaaaatatatatatatattggctgggctcgag

SEQ ID NO: 1223 - DNA (cDNA), 447 bp; double-stranded, linear
gggtgtttcatacaaagaatacaagtaactgatgaatgaagggggcatcttgtgtccccacaatcctgctgtgcgcacaccacaggtgagccgttctgcctaagggaacagccccggcccctccctccggctcctccccagcaccgtctcctccacccagtggcctggccgtggatgctgcctgtggcccagctttgagacaccgccctgacacgtgtccagccttacgtggaaggatttgtctgttttgtggcatcctagtagatgccacgttagtagatgccatgttagtagaagggatgtgggcatttctttgtaagttcccaaaagcctatgagggttttttccacgattccgttcccagtttggcttttgttgttgttgtggctgttcttggcccccctgggccctgcagtggagtggggggctgcacctgggagcctcgag

SEQ ID NO: 1224 - DNA (cDNA), 235 bp; double-stranded, linear
gaattcggccttcatggcctactttgttttatataataaagtatgcctgttatattaaataataagaatatggcaattagcgatatagcatacccaaacaaagatgttctcgatacagtctggcaaagactatcccaaggttattttaatgaattcagacattttttcctgtggatatttctccatcctaaaaaaagtggcaaccaaggaaaatatttagatgcaaatactcgag

SEQ ID NO: 1225 - DNA (cDNA), 134 bp; double-stranded, linear
gcgattgaattctagacctgcctcgagactgacgccgcaccatgaccctcctgctgctgccccttctgctggcctctctgctcgcgtcctgctcctgtaacaaagccaacaagcacaagccaccgcatctcgag

SEQ ID NO: 1226 - DNA (cDNA), 556 bp; double-stranded, linear
gaattcggccttcatggcctacacacatctggtaagcagaagcacggaaggcctttgtttcagacaatcttttaaatgatgtttgtatagggaacagctttggaagataaagaatgtctctctctcttatggtttgaatgtgtctccaacactttatgtgttgagacttcatccccagtgtaacagtattgggaagtggagcctttaagagctaattaggtcatgaggacagctcgctcatgagttgactaaagctgataatgtgggaacgtgttggttatcacaggagtgagttcctgataaaaagaatgagtttggccagattgtctctgtctgtctcatctgcctgcttccaccttctgtacttccacctggaatgaccctcaccggatgctggtgccatgctcttggacttcccagcatccagaacttctgtttttataaattacccagtctatggcattctgttatagcagcagaaaatggacagagacaccctcaaattaaaggacagtcttgctgactatgaattagaaaatatctgggttagctcgag

SEQ ID NO: 1227 - DNA (cDNA), 175 bp; double-stranded, linear
gaattcggccttcatggcctacctgcctcgaaatactaccgtatggcccaccataattacccccatactccttacactattcctcatcacccaactaaaaatattaaacacaaactaccacctacttccctcaccaaagcccataaaaataaaaaattataacaaaccactcgag

SEQ ID NO: 1228 - DNA (cDNA), 220 bp; double-stranded, linear
gaattcggccttcatggcctactgtttccttgcccttttcaccgtctggtggttccctgcagcccttggcttgtggccctctcatccatcttccgagcctagcactccagtctctgcttctgtcatcacatcgccttctcttgagaaagatcccaggctggtatttaaattgcctgttggcaggaactttgcctgtcttcccctacccccacagctcgag

SEQ ID NO: 1229 - DNA (cDNA), 526 bp; double-stranded, linear
gaattcggccttcatggcctaagtctcttgacatctcaatttaccccagaacatctctatttaattattccctgaggaggggaagttgggtatggcggttggaggtggacaggctcctaacaagcacttgccagcagggggcactcccagttttcgctccgctgagtcacccaacccctgaggcttcgccactttctaatgtttgctgtggctacaatggtcagacccacaggcaaaaaagtcgaagtccctggagtccctgacccctcttcctctctataacgattggaaactgtccaaaccaactccagtagttctgggctgatgaatcatcctcttgtggggcggagagtgggggtagggtggagcaatgtgggctaggacccagggcaggatcaaaatctctgaagatgcagagctccctctgccctgggaagaaggaagcaggatttattataacatttagctcactgtccaatcgactaaaacaagctctcccagggctcgggccaactgtcgactcgag

SEQ ID NO: 1230 - DNA (cDNA), 312 bp; double-stranded, linear
gaattcggccttcatggcctaccattgggctatgacctgaggagaatcaaggtagctttctcaggcctcgtggacatcgtggatataaggaatgctctcgtaggagggtacaagaaccccagcatgattccaatagagaaggcccaggggcccatcctgctcatngttggtcaggatgaccataactggagaagtgagttgtatgcccaaacagtctctgaacggttacaggcccatggaaaggaaaaaccccagatcatctgttaccctgggactgggcattacatcgagcctccttacttccccctcgag

SEQ ID NO: 1231 - DNA (cDNA), 297 bp; double-stranded, linear
gaattcggccttcatggcctagctttatccactctggaatcctggaggagccgctacaaccaagttgtaaaagaaaagggagaccttgagntggaaattattgtcctgaatgaccgggtaacagatcttgtaaaccaacaacaaaccctggaggagaagatgcgggaagaccgggatagcctggtggagagactacaccgtcagactgctgagtattccgcattcaagctggagaatgagaggctgaaggccagctttgctccaatggaggacaaactcaaccaggcacacctcgag

SEQ ID NO: 1232 - DNA (cDNA), 360 bp; double-stranded, linear
gaattcggccttcatggcctacgcagctctacctgctccaggggcacctggacctgtgtgagcagcactgtgccatcctcctgcagactgagcagaaccatgagaccgcttctgtgaagtggaaaacttgaagacattcctgccttctttgaattggccaagaaggtgtctagccgggtgcctttggaaccagggttcaattactgcagaggtatctactgctggcacatagggcagcccaacgaagccttaaagttcctgaacaaggcacgcaaggacagcacttggggccagagcgccatctaccacatggtgcagatctgtctgaatccagacaacgaggttatggtgcggctcgag

SEQ ID NO: 1233 - DNA (cDNA), 423 bp; double-stranded, linear
gaattcggccttcatggcctagaaggactgaaatgatgttatactaagggctactgaactttttgcctgttctttccaggtgtgacagccttttcttttctttccaggtggttcgctttgaggtggtctgaagccaaggcctcgcggagcttctttgtgtgtcaccttgcttccacgtttcagttcttgttttgtttctactgctttagttttttttaaagttctccagtgtccccaagaggtattagaatcttgctgtacccaagcaagacgttaatttttcttttaactgttttggggagggagggagtgatagcttaactgctgaagccaggcgggggtctgctggaggattccaacagagagtatttcctccactgtacaatgtcacagactatctctatcatcattgctttgtggcat

SEQ ID NO: 1234 - DNA (cDNA), 475 bp; double-stranded, linear
gaattcggccttcatggcctagcatgtaaaacttcagtcctgaacatttatagggttttatagaagggcatcctccagggctggtccattcagagaaatgctgcatgctgccgtcatggaatgtggcccacaggacaccagagccgtgagaaccggagagcagacttccctcacggctgggctgagcaaaccctccaaagccctcctcacgcagttactaacaatagcatgggcttacagcacaagcacgtgttctcacctttttcctatgccctggactaaggtttggccagtgtaatcatataaggccatcctgacattgtttctgtgtttcaaaatttggatttttatttacattagaactacattgctcctagtagaacattacctttaggggactaattttccatggagaactatttcagcatattgcatgctgctcagaccccaagtcagatatgcccacaagctcgag

SEQ ID NO: 1235 - DNA (cDNA), 301 bp; double-stranded, linear
gttttgagcctagtagcactaccttccaagtgagtcacaacaaatttgatcctatttggtatgtttttgtccactgttatgattnatcatgtatcttacaagagccactcaagcaagactctgcttctatgtatggtgaggcctngttgttctaggctagaataaactctttgtatgcctcattgaatatgccaggtaaaatttatgcagtcaagaatgaattatttttctgactaaagtgtgtagcagtagttcaaaattgtgcccttgttttaacagtttctgtcnacaccttctcgag

SEQ ID NO: 1236 - DNA (cDNA), 346 bp; double-stranded, linear
gaattcggccttcatggcctaagagaagataacatttacaagtaaacagtaagtgcaattgtattttaatttcttggtctccgaaaactcagctgtgactgctttccattaacagttccagctctatgtgtttcctctaacgctaaaggcacagcccccgggaatctactgcttcctaagagtctccatggagtctattttacaacctcctttccctccatgcttccgcggaggagtctatactatctctatatacacattttaaacattattcttcatttgaaattccttcaataaaaacacagtcaccattcttcatcttcttgggaaatggcctgctctcgag

SEQ ID NO: 1237 - DNA (cDNA), 355 bp; double-stranded, linear
gaattcggccttcatggcctactcactatgttgctcaggcggatgtggaactcctgggctcaagcgattctcctgccttggcccccaaagtgctgggattacaggtgtgagtcatggcagccacggctccagagctcgggttcttaatctggtctgtggatggcccctgggggcggtcccatgagcccctcacaattggacacagttttgcaaaggggtaaaaggacaagaatcggtagctgtgactgtggatgagcctctgagcttcactttccctccctgaaagggggtgacagtggcacctccctggaggttttcgtggaggggaggaaacacatgtaaaatacttcacccc

SEQ ID NO: 1238 - DNA (cDNA), 560 bp; double-stranded, linear
gaattcggccaaagaggcctactagacctgatcaccacgttcaaaagttggctttctccattttaagttcttccttaaagcctctttaagcaaagtccctgaaatgatacagtagaaaaatcacacagacttatttaaaatgaattctatcactattcctgagatctcgcctgccccactgaggacattttgttttcgcaaagtgctttgaaatgtgataaaggatcttaaagaatatttgtaaaattatgcccaaagaagacattctttgaggttaacttgcagtgtctaaaagtcaagaatgaggaaggaaaggaaaataacagattcactttaaaatggaccacgctaattgggcagtgaaacatccttgtgtcacaccatttaccgtagcagaccagaagagggaaaaggcttgatttttctctcatagataccacagttcactctcaaaaacattcctaaaatggattgatatttctctgatagagcacctgttttgctactgacagtgttaagttccatactaatcagctcatctagcctaacgacaactcgag

SEQ ID NO: 1239 - DNA (cDNA), 569 bp; double-stranded, linear
gaattcggncaaagaggcctaaggagaangaggctcagaaggagacgattaaggatcttcccaagatgaaccaggagcagttcattgagctgtgcaagacgctttacaacatgttcagtgangaccccatggagcaggacctgtaccacgccatcgccaccgtggccagcctcctgctccgcatcggagaggtggggaagaagttctcagcccgcacaggcaggaagcccagggactgtgccactgaggaggacgagccaccagcacccgaactgcatcaggacgcagccagggagcttcagcccccagctgcaggagacccccaagccaaagcaggcggagacacacacctcggaacagccccacaggagagccaggtggtggtggaggggggcagcggcgagggacagggctcaccctcccagctgctgtctgacgatgaaaccaaagacgacatgtccatgtcctcctactcggtggtcagcacgggctccctgcaatgtgaagaccttgcagacgacacggtgctggtgggcggggaggcctgcagccccacagcgcgactcgag

SEQ ID NO: 1240 - DNA (cDNA), 405 bp; double-stranded, linear
gaattcggccaaagaggcctagagaccagcctggccaatacggtgaaaccctgtcgctactaaaaatacaaaaattagccaggcatggtggctcacacctgcagtcctagctacttgggagggtgaggcaggagaatcactgaagcttgggaggcagaggttgcagtgagccaagattccaccgcttccctccagcctggatgacagagtgagactccgtctcaaaaaaacaaaaaaaaagttacttcaataatgtacttttttttttcaaattacagataatctataaggaattaatcttgaaattaattccaggtttaattgttaatgaaatttcacaagcctaatttaacacttgtctggataactcattttgatactgagtaaatagtcaccggtctcgag

SEQ ID NO: 1241 - DNA (cDNA), 542 bp; double-stranded, linear
gaattcggccaaagaggcctagggcttttgtgaataaattttaaaagagactactgcctgtccttaaattcctttttctttttataaaaaaagaactattaaaaatgattgacaaattttgagttaaaaaattgttaaaacattctctatatttaatttcaattttataatagattacaggaagatgcttatgaaacaaatacatttgtttcagtacatgtctttaaatgatagacttataagtatgtaaacaactatataataaaaggtttccaaacgctgcctgtaagaaatcaggcaaattttaccataagcaataaaccattccaagccttccagacagtctccatagccgcaccagcatggcaataagctttaaccaaacgaaaacaaacaaacaaaagcacttcgcaatttgttgctgcaaaacagggagagaaaagagtgtacaaacttgatggaatcacaacagtcaatataatttaagggacaataaagtcaataaggttgatggtgtttattgtttaaaaagttaggcctct

SEQ ID NO: 1242 - DNA (cDNA), 370 bp; double-stranded, linear
gaattcggccaaagaggcctactgatacaattgttgacttttcttttactatgtgtaagaaataccccaaacatgaaaagattgttttgatcatatgcatgtatgtagaatatttttgcagagcagaaagattatgttagaagtgtgatttttattttcagaagtcatatacatgtaagctacaattttgagtgctttataaacacttaagatatatatataaattttaatttcatagcaacttgtaaaaaataaaatacttgttgaaaagcctttttcaacatatccctaagctaagggaagaggaaggaataacaactcagtgaaaagatggtctccagtttctgaatgaaaaagctacaacctcgag

SEQ ID NO: 1243 - DNA (cDNA), 374 bp; double-stranded, linear
gaattcggccaaagaggcctagcctcatcacgggcagggctctggcccatagtggctggacagacactggcacagtcttgctggtctgctgggagcacacagacattggcacagacttgctggtctcttggaagagggcaagaccccaaaccagagcaaaatacacttccagctcttaaccaggctccttccagtcacaagtgtgcagaatcagaacagaagtagtaccaatcaatgtcacatgaacaaacaagctgcccccagggtaccatttggggaggggaaatcttttctttctttcccccttaaaaaaaaacacatctgccccgaacactttcccactgttattctttcctcataccccaacgctcgag

SEQ ID NO: 1244 - DNA (cDNA), 468 bp; double-stranded, linear
gaattcggccaaagaggcctacacaccaaactgattatccaccagacactcagcgtcttagaagatattgtggagaatatctcgggggagtccaccaagtctcgacagatttgctaccagtcgctgcaggaatctgttcaggtctccctggccctctttccagcttttatccatcagtcagatgtgactgatgagatgctgagcttcttcctcactctgtttcgaggccttagagtacagatgggtgtgcctttcactgagcaaatcatacagactttcctcaacatgtttaccagagagcagttagccgagagcatcctccacgagggcagcacaggctgccgggtggtggagaagtttctgaagatcctgcaggtggtggtccaggagccaggccaggtgttcaagcccttcctccccagcatcatcgccctgtgcatggagcaagtgtatcccatttcgctcgag

SEQ ID NO: 1245 - DNA (cDNA), 444 bp; double-stranded, linear
gaattcggccaaagaggcctaagcttatggggaggacacatatttactcaaacatcctggcaattcatatctagggcactccctctgtgtgtcagacgcccttgcatgtgtcaaatgtcatctgataacattgatgaaaaatatcattcacttcttcttggtgcagaaggcatagaccggattatgcaatcactgagaagtagcttctggatgtgttttctggtggcgtcttaacaatttcagccgactgaaggctcttggacacttggaacatttgtagggtttctctccggagtggatgcgctggtgctccttcaggctccccctgtaggtgaaaactttcttgcagtctttacattcgaagggcttctccccctgtgtggcttctcttgtgacacttcaagtaggacttctgggtgaactgcttaggcctctttggccgag

SEQ ID NO: 1246 - DNA (cDNA), 431 bp; double-stranded, linear
gaattcggccaaagaggcctagtattttgtactagttttttaataattataagtcttacacgttctctaattcttcttgaatctgtttaatttttctcccttgggaattgttaagtgtacatgtattgtgataactgctataattttgcttttattgattttttttgctttatatctgctacaatttggttcctccaaatcccatgttgaaatctgatccccagtgttgctgggggatctaatagcaggtgtttgggtcatgggaacaggtccctcatgaatgaattaatgccctcactgggaggaggggataagtaagctctcactcatttagttcccaagacagctggttgtttaaaagagcctagtgccacttctctcttgcttcctttcttgccgtgtgatctctgcacatgccagctcccctcgag

SEQ ID NO: 1247 - DNA (cDNA), 389 bp; double-stranded, linear
gaattcggccaaagaggcctattttttttttttttttttttttttttttttcngggtgtagaacatttatttatttttcccacaaatcactgaaagtttaggtcagtgggaaataattttaatcaaataattgtacatattcttcccacatatcctgccttgtattaggaaatgacattgtgatccatttcattacaagtaaaatattacaaaatatttacaggaaaatattaaaaataactcaaacacaaaaggcaagatgaaataaactgtttttttttctccagaaatctctactccagtgcccacagcacacaagagtcaaaacaaataagcaactaagatcccccgatcacaaatttccaaagaactaggcctctttggccgaa

SEQ ID NO: 1248 - DNA (cDNA), 380 bp; double-stranded, linear
gaattcggccaaagaggcctaaaggaaggccacttctcaactggcagaacttctgaagtttagaattggaattacttccttactagtgtcttttggcttaaattttgtcttttgaagttgaatgcttaatcccgggaaagaggaacaggagtgccagactcctggtctttccagtttagaaaaggctctgtgccaaggagggaccacaggagctgggacctgcctgcccctgtcttttccccttggttttgtgttacaagagttgttggagacagtttcagatgattatttaatttgtaaatattgtacaaattttaatagcttaaattgtatatacagccaaataaaaacttgcattaacttaggcctctttggccgaa

SEQ ID NO: 1249 - DNA (cDNA), 386 bp; double-stranded, linear
gaattcggccaaagaggcctgtttggtttgtgactagacttaaaaatactaaaataagccaaatagatgctaacaatactaatttgcacacaagatttgaaaaaagtacttcaagttttatctcttatccctagagaaagtaaataaaaagtggctcttgcaaaaataaatgaaaacaaaaccaccaacaaaaactaatcatataagatactgtttttctttttgaatacttcaattggtcctatattaggataaggttttgatagcaaggacttcctagcttcttcctttatcttccattctctagtcacttccgtgtttttatcaaacaaggctacgtgtaggctttcctacaaagtcagattgaattctaccaccctctcgag

SEQ ID NO: 1250 - DNA (cDNA), 428 bp; double-stranded, linear
gaattcggccaaagaggcctaaccatgtctgaccagatcattgggagaattgatgatatgagtagtcgcattgatgatctggaaaagaatatcgcggacctcatgacacaggctggggtggaagaactggaaagtgaaaacaagatacctgccacgcaaaagagttgaaggttgctaataatttatactggaatctggcatttttccaagccaagagaagatcgaatggctttttgcagctaactactatgtgtagacaggttttatattataaagtatgcattcttatcacctagtatatagttagtttgtagagtgatttccccccagtttcttgaacatggtatcttcacatcttggaccttggtcagttgtgctattcattattaaacactaaaactttggcggtttaggcctctttggccgaa

SEQ ID NO: 1251 - DNA (cDNA), 264 bp; double-stranded, linear
gaattcggccaaagaggcctaagaaaagtagtatgaatgagtttttctacatattaactacaatttatggtaatttgtgaaatgtttttccatttttaaatgtaagagtctctatctccactcacaaagcaacaggcactgctaggggtcttaggctaacatctgccaccccaccagtctgcatggcccataaacaggtgcagaggaccagagttcacctgtcagcagcaccgcagaatccaactctaggcctctttggccgaa

SEQ ID NO: 1252 - DNA (cDNA), 436 bp; double-stranded, linear
gaattcggccaaagaggcctactttttttttaattttccactttcttcttaactttacttctctttttgtccccccccatcttacagaagttgaggccaagggagaatggtaggcacagaagaaacatggcaaactgctctgtgctttcaaaccaaagtgttccccccaaccccaaatttgtctaagcactggccagtctgttgtgggcattgttttctacaaccaaatctgggtttttttcttctttctttaaacatagaggtaccaccacaagggatgccctactctctcgcagctcttgaaagcatctgtttgagggaaaggtctctgggcaagcaagtggttatttggattgcttgcttccctttttccacctgggacattgcaatcataaaataacagtaaattccaaacctctaggcctctttggccgaa

SEQ ID NO: 1253 - DNA (cDNA), 399 bp; double-stranded, linear
gaattcggccaaagaggcctagggtagatcacttgatatcaggagtcgaggcgggaagatcacttgacgtcaggagttcgagactggcccggccaacatggtgaaaccgcatctccactaaaaatacaaaaattagcctggtgtggtggtgggcacctgtaatcccagtgacttgggaggctaaggcaggagaatttcttgaacccaggaggcagaggttgcagtgaccagcaaggttgcgccattgcaccccagcctgggcgataagagtgaaaactccatctcaaaaaaaaaaaaaaaaaattcctttgggaaggccttctacataaaaatcttcaacatgagactggaaaaaagggtatgggatcatcaccggacctttggcttttacagctcgag

SEQ ID NO: 1254 - DNA (cDNA), 444 bp; double-stranded, linear
gaattcggccaaagaggcctacccggtacttacttctcaatcctaaagagagaaaacaggtgtttgatcagtatgtaaagaccagggcagaggaagaacgcagggaaaagaaaaataaaaatgcaagccaaggaagatttcaaaaaaatgatggaagaagcaaaatttaatccaagagcaacttttagtgaatttgcagccaagcatgctaaagattcaagattcaaagcaattgaaaagatgaaagaccgagaagccttgtttaatgagtttgtggccgctgctaggaagaaagagaaagaagattcgaagaccagaggtgagaaggtaagatggttttagttccagtggtgtgattgatgggagtgtgaatgggaaaggtctatgctggtgttatgtttctaaccttattcattggcataaataataggacgtacactcgag

SEQ ID NO: 1255 - DNA (cDNA), 284 bp; double-stranded, linear
gaattcggccttcatggcctaagaaggactaccctgcactgctttccttggatgagaatgaactcgaagagcagtttgtgaaaggacacggtccagggggccaggcaaccaacaaaaccagcaactgcgtggtgntgaagcacatcccctcaggcatcgttgtaaagtgccatcagacaagatcagttgatcagaacagaaagctagctcggaaaatcctacaagagaaagtagatgttttctacaatggtgaaaacagtcctgttcacaaagacaaactcgag

SEQ ID NO: 1256 - DNA (cDNA), 691 bp; double-stranded, linear
gaattcggccttcatggcctagtgggagtttgctaatgtgaaacctaatgatgtctgaaaatggtcctgatgggtattaatagccatctggaaaaattttacatcttcacaaataatcccaataatttatattgtgaagatattatcctgatagtccttcttttcctatattcttgtcggctgtaggatgagagcagtatgaagcaaacagaagacattttgaaattaatcacaaaattcccattgctttgaagcctgctattattatactaagccttcttatagctttaaaaatcaaacaatgccaaacagtatatctaacatttttaatttcctttgagccaaaccaatttggtttaaatttctctgcctccgtgaagacaagctgggctggggaggacggtgtctaggagggatgaccccactcagctccaggcagtgttctgccgagaccccaagaactcggggtgtcagagggcaaaggaactacctgcctttcacggctgctgacttctcagggctgcaagcagcacagaatgttatccttacgtcctgagccggtttaagtctgtggaaaaggaagcacgggagaaatccacgtaacctttgctttctttttaagggaagcggttccgccgtgaacttggaaccctcagctccgggtgttctcggcagaagggcagctctcgag

SEQ ID NO: 1257 - DNA (cDNA), 383 bp; double-stranded, linear
gaattcggccttcatggcctaagctgatccacgatcagagtgctcccagctgccccagcagctccccgtccccaggggaggagcctgagggggaaggggagacagatccggagaaggtgcatctcacctggaccaaggacaagtcggtggcagagaagaataagggccccagtcctgtctcctctgagggcatcaaggacttcttcagcatgaagccggagtgggagaacttgaaccagtccaacgtgcggcgcatgcacacggccgtgcggctgaacgaggtcatcgtgaagaaatcccgggacgccaagcttgttttgctcaacatgcctgggcctccccgcaaccgcaatggtgatgaaaactacatggagtttctcgag

SEQ ID NO: 1258 - DNA (cDNA), 418 bp; double-stranded, linear
gaattctgagggactaactacgaccatgagattggcagtgatttgcttttgcctatttggcattgcctcctccctcccggtgaaagtgactgattctggcagctcagaggagaagaagctttacagcctgcacccagatcctatagccacatggctggtgcctgacccatctcagaagcagaatctccttgcgccacagaatgctgtgtcctctgaagaaaaggatgactttaagcaagaaactcttccaagcaattccaatgaaagccatgaccacatggacgacgatgatgacgatgatgatgacgatggagaccatgcagagaacgaggattctgtggactcggatgaatctgacgaatctcaccattccgatgagtctgatgagaccttcactgctagtacacaagcagtcgag

SEQ ID NO: 1259 - DNA (cDNA), 189 bp; double-stranded, linear
aaaaattaaataatgcttgacttttttttttttttttctctttttgaggcaggttcttgctctgtcacccaggctggactgcaacagcatgatcttggctcacctccgcctcccaggctctggcaatcctcccacctcagccttcagagtggcagagactacaggctcataccaccgcacccactcgag

SEQ ID NO: 1260 - DNA (cDNA), 278 bp; double-stranded, linear
gcgattgaattctagcctttcctccgttcaagtaaatttagaaatttcctaagttttctttataacaggtagcctaaatctatatcatacttttaaaataaaaatctaggtgcaaatttgttcttatggttaaggttaacatgtacacttcacaaacattgagacttttgttttgttttctgggacaaggtcttgttctgtctcccagctggagtggatacaagcatggcttgcttcagcctcaacctcccggactcaagcgatccccccccctcgag

SEQ ID NO: 1261 - DNA (cDNA), 265 bp; double-stranded, linear
gaattcggccttcatggcctactcactggatgctgggggagggcccctcaggtgagcagcccaccactgacttcagcgttgctggctcggttatcagactctcatccaacacaagctcacagggaaagccgttccttgctccttgtggagggagctaccgtcattgccctgagaccaccagccaagaaagtaggtatgtccaggtagggaattcagagggacccagtgcatccaattatacaattatacccagaaagtcctcgag

SEQ ID NO: 1262 - DNA (cDNA), 426 bp; double-stranded, linear
ggtcagtattgaaggttgttttctgagccattgtatgaagctgctgttttggcgtccctaatgcagggtgagatggtagtgtgattcttgttgtgacatctcgtgactgggcaggacgctgaatactgattgctgcagatggaggatgctggatagacaaggttggcctactaagtgctgaatcagtagcatgcgccgctgtcgtagtgatgactggagactgagctctggtggctgagacagttgctaccacagcaggagggatggcattggaggtggtcacaggtggccgagactggattggttggtgaatgatgtgctgtactgctggctgagcagtagcagcatttggcagctgtgaggtcggcctcaggactgtggttactttagaactggacatcacagcagcagcagctgcacctcgag

SEQ ID NO: 1263 - DNA (cDNA), 398 bp; double-stranded, linear
gaattcggccttcatggcctaggccggtgtttatgcacgatggcgttgaaagctagtccatctctccagctggtggtgaagttgtgtacattgacgttgggataacctgcagtcttcatctggcaccacagaagcagggcatccttggctgacttcttctccttgttgtcttctgtctccacactgatgtcttggatctggaatcgaaggatgatggtccagaccagcccaagggtcagtcggtggtttccgtccacaatgtcatgggagcccatgttttccaagtgcactttctgctccttgaggaactgcagtgccttgtccacgttctccaggcagtggatccgcatgcggccctttgtaggctttggcagtatctctcccgagagcacctcgag

SEQ ID NO: 1264 - DNA (cDNA), 256 bp; double-stranded, linear
gaattcggccttcatggcctaaaaaaagctgttaagaaaatatgttttaaaaatttgcccaacaggaaggagaaaattagaatctaatagcaaacttgtgtcaaagcaggggagaccacatgatcttcctctttgaaaatctgtcctgggtgatgaccatatgctctctaaacaggttttctgtgttttagggaaagaagctcagaaaggacccctgctctttgatgacctccctccggccagcagtaacctcgag

SEQ ID NO: 1265 - DNA (cDNA), 249 bp; double-stranded, linear
gaattcggccttcatggcctacagagtctaattagccatatttatatgataataataaacattttggctacagtcctacctagattttttttttttagatggagtcttgctctgtcgcccaggctagagtgcagtggtgcgatcttggctcactgcaacttctgcctcccaggttcaagcaactctgttgcctcagcctcccaagtagctgggattacaagcgcacatgaccacgcctggcagctcgag

SEQ ID NO: 1266 - DNA (cDNA), 265 bp; double-stranded, linear
gaattcggccttcatggcctaggttatatagcagtgatgctttcatagtatttttcttgaataaggtccccaaaaccttattaagttcctggtaggcatggagcattgaagatggcagacatggtgcagtctctcaaggagtttacgctctagtggagaaaacaatcagacagccttaaaatacatgtatggctactataataaatactgtgaagcaggagtgcaccacgaaacctggagtcctctccatcctccccttctcgag

SEQ ID NO: 1267 - DNA (cDNA), 293 bp; double-stranded, linear
gaattcggccttcatggcctactagacctgcctcgagattaggggggttagactcagaattctgtccaaactcctggacgacctcttgaaattaagtcagggattttatgtactgggttaatttcgtaacctctgggtataatattaggtttgcatgtagaaagggtctccagtataggacttcaaagaaactaagccatagacgtaatttaagggctgttctgatctgaagaagtgccatgggtagaagttttagccatggtaaagaggcttcctggcatcatttgctcgag

SEQ ID NO: 1268 - DNA (cDNA), 501 bp; double-stranded, linear
gaattcggcctcatggcctactggtccaagctgattaccctcatagtgtccatcattgaggaagacaagaattcctacactccctgcctcaaccagtttccccaggagctgaatgtgggtaaaatcagcgctgaagtgatgtggaatctgtttgcccaagacatgaagtacgccatggaggagcacgacaagcatcgtctatgcaagagtgccgactacatgaacctccacttcaaggtgaaatggctctacaatgagtatgtgacggaacttcccgccttcaaggaccgcgtgcctgagtaccctgcatggtttgaacccttcgtcatccagtggctggatgagaatgaggaggtgtcccgggatttcctgcacggtgccctggagcgagacaagaaggatgggttccagcagacctcagagcatgccctattctcctgctccgtggtggatgtcttctcccaactcaaccagagctttgaaatcatcaagaaactcgag

SEQ ID NO: 1269 - DNA (cDNA), 330 bp; double-stranded, linear
gaattcggccttcatggcctaggcccctgctccacctggggggactgggagtgtgagtgtgcatggcatgtgtgtggcacagatggctgggacgggtgacagtgtgagtgcatgtgtgcatgcatgtgtgtatgtgtgtgtgtgtgtggcatgcgctgacaaatgtgtccttgatccacactgctcctggcagagtgagtaacccaaaggccccttcggcctccttgtagctgttttctttccttttgttgttggttttaaaatacattcacacacaaatacaaattgacaggtcaaaatccatgaaatgagatcccccagcggctcgag

SEQ ID NO: 1270 - DNA (cDNA), 502 bp; double-stranded, linear
gaattcggccttcatggcctaaaaaaaaaatactgattcacttttgcaatttttcagatactacttgatgtgacacctcccctaggcttgctgtgggtctcttggaagatagagctatattaactccttgacttaaagggcagcagactatataaggtctctttacagacagagtagggagaataatgaaaaactttttgatttctagagagaagagagaagacatagcaatggaactgttcttagctttgtttgctacaactcttcaaagtttaattttagattcagtgcatttattcatagagcatgaaacatataatcatgccttttactaattgcggatacttaaaattatatatttttgacctactgtgttatggtcaatttgaaaaagaatggtttgattatatattattgtctgtagattccctgtactattctaggatcatatgacatattatcattactaaatatagcactaattattgatgctccgctcgag

SEQ ID NO: 1271 - DNA (cDNA), 285 bp; double-stranded, linear
gaattcggccttcatggcctacccctgactattcagtaggagaagaaatcaaaaatccattcttttctccttctctccctccaacagtggccaggggaaggggaagtgagggcaggggcaaaaagatttgggaatttttatttatttatttattgtgacttttcatttttttggtatttggctttactggaataggagggcccctgcccactgtgccccgtttatcccttattccccaaaccctgctctccccaacacctactcacttaagcacttgtcctcgag

SEQ ID NO: 1272 - DNA (cDNA), 405 bp; double-stranded, linear
gaattctagacctgcctccaatttgaagatttatttctctctttggatatagaacaaaataactttatgtacattttatttcactttattttactattgggttggtgcaaaacaaattgcagttttcccatgaaaagtaatggcaaaaactgcaattactttcgcaccagcccaatattttattttgagacagagtcgcactctgtcaccaaggctggagtgcagtggtgtcatcccaactcactacagcctctgcctcctgggttggagagattcttgtgcgtcagcttcatgtgtaactggaattacaggtgcacgccaccacgcccagctaatttttgtattttttgtagagatggggtttcgccatgttgccctggctgttctcaaactcctgacctcgag

SEQ ID NO: 1273 - DNA (cDNA), 412 bp; double-stranded, linear
gcgattgaattctagacctggctcgaggcaggtctagaattcaatcggcttcctggcagtgccctctcccagatgagacctgatctcttttttgttttttgttttttgttttgagacagagttttgctcttcttgcccaggctgcagtgagttgagatcgcaccactgcactccagcctgggtgacagagtgagaccccatctcaaaaaaaaaaaaaaaaatctggccttatggactgtgtactacactctagtgggggtaagaggcaatgggtaaataggtaagtagattattggatgtattagaaggggcatggggaatgtggggtcaaggttatagttttaaatagggtggtcagggaaagctttctgagaaggtgacatttgaaacaaatacttgaaggagtctcgag

SEQ ID NO: 1274 - DNA (cDNA), 285 bp; double-stranded, linear
gaattcggccttcatggcctagctatttttaaacaatatctgagattattcattcaactaaaacttattaagcatttaatatctgtctggcattcttcaggcaccaaggatatttcgttgaacaaaacaaaatctttgtcactatggagtttacgttttgtggtggcattggagtgaagagctagggaataaaaaaacaagtcaatatgtagtatgccacttggtggtaagtcatttggagaatgatgtagtagggaaagaggaaaagggtgtaggcatctcgag

SEQ ID NO: 1275 - DNA (cDNA), 280 bp; double-stranded, linear
gaattcggccttcatggcctactccacacattcatctcccaaaggactccttgaatatttgccccaaaacatcagctcccagaaaacacccctcccagtcacacacacacccaaattctccgatgtattttcattttttttctcctcttctcttctctttttccttccttccttctctcttttctctctttccatccctcccttccttcctccctcccttccttcctccctcccttccttcctccctccctcctttccttcctccccccacccactcgag

SEQ ID NO: 1276 - DNA (cDNA), 220 bp; double-stranded, linear
gaattcggccttcatggcctacgagtggtgcgatttttttttcttagcttatcagctatggttagtgttagcgtattttatgtgcggcccaagacaattcttcctcttccagtgtggcccaggaaagccaaaagattggacacccctggtagaggcagaaactcactgggttagttccacagcatctgatcaaagatatgaggccaaagagcctctcgag

SEQ ID NO: 1277 - DNA (cDNA), 246 bp; double-stranded, linear
gaattcggccttcatggcctacgagctgagattgcgccactgcactccagcctaggcaatagagtaagactccatttcaaaaaaaaaaaaaaatgttgatcaaaagaagccagatgacagagtactcactgtgtgagtccatttatttgaaattctagaacaaaaaataaatatccattgatagaaatgggaacagtgttggcctatgaagaatggaaattgactggaaggaggcctctgctcgag

SEQ ID NO: 1278 - DNA (cDNA), 499 bp; double-stranded, linear
gaattcggccttcatggcctagctgggcgtgatggcgggcgcctgtagtcccagccactcgggaggctgaggcaggagaatggcgtgaacccgggaggcggagcttgcagtgagccaagattgcgccactgcactcccgcctgggccacagagagagactccatctcnaaaaaaaaaaaagaaagaaaaaaagaaaataaacaaagaaaaaattaagatttttgaaataaaaacaaatattaaaaattattgaaatatattgaaagttttttcaccatatatatttaccttttaaaaggatatgaattcaattattttatttgcttatggaaaatagatccactgctctaagatgctactaatcatgctcagaggattcacaacaaacagactgataaggtattacttaaagcgctctacattaaatagagcattccagttttctagggcacactacttgctgtatttccaaggtcaagcaaaatagctttcgttcgag

SEQ ID NO: 1279 - DNA (cDNA), 317 bp; double-stranded, linear
gaattcggccttcatggcctaatgagctaaaagcagtgtcatctccgcatgttggagcagccaagaaatagtttggtactaccgacattgtctaatccatgtcacatcctcatacaatttaattgctcaaccatgcatttaaaactcctcaagaaaggattggtactgcaactgtaggtaaactgaaaaaaaataagaaagaaagagttggatgaaaatgtgaaagcccaagtttagatgtgcattaagtattaaatagcacagtatcttcttcatggagccttttttcctcccccatcccctgcagctacctcgag

SEQ ID NO: 1280 - DNA (cDNA), 407 bp; double-stranded, linear
gaattcggccttcatggcctacttcctttcattttgaagcaacagtttataaacaggaaagtctactggtttcatagaatctgtcagatttgcttatttgctactggtttcacgcgcgtggactatattccagtgtttctagtcaaagacctttatcctcaaatcatgagattagagtaaaacaactgctgtaaggttgagcatttcatgaccaatgactatgaaggcacattcaccaaacacaggcactttaagggcatccttgattaatttgctaattgctattttttgttggtatgtgaattcctgctaggaggccgaggctagtaggcaatgaaaaagacagaacaatggtaaaatgcagccccggtcctctacaaattgacagtataatttaggggctcgag

SEQ ID NO: 1281 - DNA (cDNA), 281 bp; double-stranded, linear
gaattcggccttcatggcctaagattgacaaagaaatagagcttcacagaattcttcatcataagcatgtagtgcagttttaccactacttcgaggacaaagaaaacatttacattctcttggaatactgcagtagaaggtcaatggctcatattttgaaagcaagaaaggtgttgacagagccagaagttcgatactacctcaggcagattgtgtctggactgaaataccttcatgaacaagaaatcttgcacagagatctcaaactagggaacctcgag

SEQ ID NO: 1282 - DNA (cDNA), 250 bp; double-stranded, linear
gaattcggccttcatggcctagtagtttattatatagaaattatttgtccttgtcttagttgtgccctttgactcagcaattccccttctataaaattttcccaagcagatgattatggatatatgcaccaatttggaaacagggatgtttattgtttatagtagcactcaactgaaaacaacatagttgtcttcaggagcggggactgattaaattatgacatgaagcagaataatgcaaaatctcgag

SEQ ID NO: 1283 - DNA (cDNA), 257 bp; double-stranded, linear
gaattcggccttcatggcctagctgaagaaggccttcacagagcttcaagccaaagttattgacactcaacagaaggtgaagctcgcagacatacagattgaacagctaaacagaacgaaaaagcatgcacatcttacagatacagagatcatgactttggtagatgagactaacatgtatgaaggtgtaggaagaatgtttattcttcagtccaaggaagcaattcacagtcagctgttagagaagcagtctcgag

SEQ ID NO: 1284 - DNA (cDNA), 434 bp; double-stranded, linear
gaattcggccttcatggcctaaagactagcatatttatctttgacttgattaatcagacctaatttgcattcgcaaatgagactgataaaaatggatttaccttttaacctttagaggaggaaaggtatttctctgcaagatttctggggctatcgtttcttaaccgataagaagccactcctttatcaataaagatgaaaatccgcaatttgcattagtgaatgggactgattattatatagttaattagcatctggaaatgaggattatcttaattacaaagcacaatttccctaatagctacaaaactgtaagtttgatccatgtggaaattggtaacattattatgtaattagtgataacattaatagtgtagaatatttagatgtaatttgcatatgcaaatgtgatttacctgagccaaaaactcgag

SEQ ID NO: 1285 - DNA (cDNA), 302 bp; double-stranded, linear
agcaatatttattttagacagacttctgcgttatgacccggctgctgggctacgtggaccccctggatcccagctttgtggctgccgtcatcaccatcaccttcaatccgctctactggaatgtggttgcacgatgggaacacaagacccgcaagctgagcagggccttcggatccccctacctggcctgctactctctaagcatcaccatcctgctcctgaacttcctgcgctcgcactgcttcacgcaggccatgctgagccagcccaggatggagagcctggacacccccgcactcgag

SEQ ID NO: 1286 - DNA (cDNA), 245 bp; double-stranded, linear
gaattcggccttcatggcctaatcttttctaatttgtcttaatgctttataattttctatgcagaggtcttgtagatctctttccaagatatttgatgtttgtttgtttgtttgtttgtttgttttttgagacggagtctcactctgttgcccaggctggagtgcagtggcgtgatcttggctcactgcaacctccgcctcctgggttcaagcaattctcctgcctcagcctcccaagtctcgag

SEQ ID NO: 1287 - DNA (cDNA), 232 bp; double-stranded, linear
gaattcggccttcatggcctaattttttttctcctctttcttctagtacatattgataggtataacataattaaggtttaaaaaaaattagacatagttattcagatttaggaccagtaaggatagaactttctcttatttatgaaaaaaaatgctaataattttggggcagttttttcctttaattatttttttcaatttcaagtttaattttattttagctgatctcgag

SEQ ID NO: 1288 - DNA (cDNA), 298 bp; double-stranded, linear
gaattcggccttcatggcctataggccatgaaggccgccttcatggcctaagaagatcacttgaatctgagaggtagaggctgcagtgagcgaagatcacaccactggactccagcctgggcaacagagtgagaccctgtctcaaaaacaaagaagagcactagcttctctatcaagtaagtgtagggttttaaaaaacacaaatggactttggtagaccaaaacaaaagcccacgagtatggaagtttcccttgaagttggaaattcaatttcccccttacccccccaaccctcgag

SEQ ID NO: 1289 - DNA (cDNA), 227 bp; double-stranded, linear
gcgattgaattctagacctgcctcgagccatacccatggtcagcctcttcctcgtgttcacggccttcgtcatcagcaacatcggccacatccgcccgcagaggaccattctggcttttgtctctggcatcttcttcatactatcgggcctctccttggtggtgggcttggttctttacatctccagcatcaacgacgaggtcatgaacaggcccaaacagctcgag

SEQ ID NO: 1290 - DNA (cDNA), 264 bp; double-stranded, linear
gaattcggccttcatggcctagacaactcttagctaaatgtggtttggttttgagctggaagagagtacaaggtgcttccggaaagcttcaagccttcggattctgtgagtacaaggagccagaatctaccctccgtgcactcagattattacatgacctgcaaattggagagaaaaagctactcgttaaagttgatgcaaagacaaaggcacagctggatgaatggaaagcaaagaagaaagcttctaatgggaatactcgag

SEQ ID NO: 1291 - DNA (cDNA), 323 bp; double-stranded, linear
gaattcggccttcatggcctaggtgctctcaaggatcagtactgggtaacaataatcaaactttgaatttaaacatgcatctattatttgtgttttttgtttttgtttttgaggcaaagtctcactctgtcacccaggctggagtgaagcagcccaatcttggcttactgcaacctccaccccctgggttcaagcaattctcctgcctcagtctacctagtggctgggattacaggcgcccgccaccacgcccaggtaatttttgtgttttagtagagatggggtttcaccatgttggccaggctggtctagaattcaatcgg

SEQ ID NO: 1292 - DNA (cDNA), 289 bp; double-stranded, linear
gctcgagaaacttctgctgcacgtgcgtcttcccctccaccttcaccccttgtggctcactcacgcacccactctccagtccacccctcctcagagaccctgtccactcatccatctctctcccattgcgcttcctcttcactccgttccttctgcctcccaccatatgcaaatcttctccatccttaaaagcctgattgcctcctctggatttttccacactcttggggaacttcctgtgactccctgcccttcaccaccagcctttcccaaagagaaatccctctca

SEQ ID NO: 1293 - DNA (cDNA), 421 bp; double-stranded, linear
gaattcggccttcatggcctagttgaaatctttaggaatgaacttctgagggccaaaaaatgtgactgacgggaacaattcttaaactgattaactagctgtaatatagttttgtgaatttattgcactgatgttgtaccttgtggtatatctgtccctattaaataagtgttgttttctcctctttaatattgctgtgaacagtggtgcccattgtagcatatgtttgatttttttttattatttcataagaaaactacgttaattttaccttactttcattgtaaataagcctgtcttcctatctggattttttgtgtgcatacatattctactgattaactacttttgcagttttaatcctgtattatttcttctactttgttttgtgtaaaaggggaaaaaataaaaaaagctcgag

SEQ ID NO: 1294 - DNA (cDNA), 408 bp; double-stranded, linear
gaattcggccttcatggcctacaggtgtatgtcaccatgcctggctaattttgtttttcttttctttttttttttttcctagagacagggtctcactatgttgtctgtcctggctggtctcaaactcctgggctccatcttcccgcttcggcttcctgaagtgctgggattacaataggcatgagccactatgcccatcctaaagttttacagcccaataatagtaatattccatcactacagctatcattgagtttcagaagttagactgttaaaagtttcagtaaagagctttaaccagtttattgtggcaatactgtgtacacaattattttttgtaaaaggaaggagatttctgtcttaaatagctttaataaagtttcagtttcatatacaggaaacctcgag

SEQ ID NO: 1295 - DNA (cDNA), 259 bp; double-stranded, linear
gaattcggccttcatggcctacaggcactccagttataattatgtgcctttcttccatttctaccactttctctgatacttctcacttctttctctggtacttctcacttctttctctggtatcattttcattcttcatcattgttttagtgcctttacttcaattccttcattatttgaatttttctttttatcatcttgtgattcagtttttatttattttttgatagtattctccttttcttccattccactcgag

SEQ ID NO: 1296 - DNA (cDNA), 257 bp; double-stranded, linear
gaattcggccttcatggcctagtggagagtgctatcattaacacctgaactctgggccagcttaagtgtatattctgtaaaaaatttgaaatcccccaaatgtcacatgctatgacagtcactttctttagtactttgtaatcatacaaaatggtgtatgggctaaatattgcagcacctatgtcgtcatcctccatgttgcttattgatcatggaatgttaatttagcaataattttctctgtgtgtgcgctcgag

SEQ ID NO: 1297 - DNA (cDNA), 327 bp; double-stranded, linear
gaattcggccttcatgcaagtagggtatgtaggcttcagttggttctactttcagagagttaagatggaatgaggcagctcatggcactacaggtcagttgccttctctccaaaatgttcactcatgcatgtgggcactcattgtatttgaataacagcaacagtgcctccctcagtttggaacctctagtccacttgctcactcatggtccctgccttaaccccagtcaagttcaaagccataggcatcatttgtccgactgacatattagggcatctaccagtcaaagggtgattgttgtagatgacctttggcccgttctcgag

SEQ ID NO: 1298 - DNA (cDNA), 286 bp; double-stranded, linear
gaattcggccttcatggcctacactctcatgtttgttgcagcattattcacaatagccaaggtatggagtcaacctgaatgtcgaacacatgaatggataaagaaaatgttcacacacacaatgaaatgtgatttagcctttaaaaagaaggaaatcctgccatttggaacaacatggatgaacctggagggcattgtgctaagtgaaataaaccagacacagaaagacaaacactgcatgacctcacttactgtggaacccctcgaattctggatctccctcgag

SEQ ID NO: 1299 - DNA (cDNA), 285 bp; double-stranded, linear
gaattcggccttcatggcctaatgaatttagtattatttctatcatttcaattgcaaattgtcagtatcccctgctacgtttctactaatttaccatcgcttcttcaaaaaattgtgttcagagtgctacaatttcagactttgaaatgaatcactataacttttaaaaattagagattttaaaaactggagattgaatatatataaaaaatacaaaatttgacatttaaaacctcattgaacttttaaaaaagccagactcatattaaggcacacaccctcgag

SEQ ID NO: 1300 - DNA (cDNA), 292 bp; double-stranded, linear
gaattcggccttcatggcctagggccaatggccaggatctctggggactagaagggtggattcctgaacctgggtaacaacgagacaaactctagcaatctgagcaagggaagggtcatcaaagtcccaaaatctagcccactagctgcctagccaggtaaaccaaggcttagggagtttagaccctttcacataaagaagcttaataaaaagtgttgggtgaagagataaacacatgaaggggttggctaaagtcaaaagaagatccgaggcaggtctagaattcaatcgg

SEQ ID NO: 1301 - DNA (cDNA), 548 bp; double-stranded, linear
gaattcggccttcatggcctactcctcatttgccaccaccaggccagtttgtccctttccaaacacagcaatcacgatcgcctctgcaaaggatagaaaatgaagtggaactcttaggagaacatcttccagtaggaggttttacttaccctccatcagcccaccccccaacattacctccatcagctcccttgcagttcttaacacatgatcctttgcatcaggaggtgtcctttggagtaccttatcctccatttatgcctcggaggcttacaggatagtagataccgatcccagcagccaataccacctcccccttatcatcccagcttactgccatatgtgttatcaatgcttccagtgccacctgcagtgggcccaactttcagctttgaattagatgtagaagatggagaagtagaaaattacgaggccctgttaaacctggcagagcgactgggagaggcaaagcctcgtggactgactaaagcagatattgaacaacttccttcttatcggttcaatcctaacaaccaccaatcctcgag

SEQ ID NO: 1302 - DNA (cDNA), 384 bp; double-stranded, linear
gaattcggccttcatggcctagtatctatctagtgcctgtttgtgcgtttttttctttcttccgctgcttccccattttccttctgtcctttttctcctgctccttgttttcccagcagcacatggggttcctcggaggagcagaggtggccgccgtgggggggcgtttgggctgcggtgctgcgtcatttttcctttgctttctctttactttagacactggcccaactccaggcgtttcctttcattccctcagtgcttctcttctgacctgcatgttgagttctgtattgctggggcttccaacaaaaaccagagtcactgacagagggaacagcagagaccttgttggtattcagctgtgatggatatagcgatctcgag

SEQ ID NO: 1303 - DNA (cDNA), 140 bp; double-stranded, linear
gaattcggccaaagaggcctagggtacgtgaatctattttttcagctggaaattttatgaaatctggtgtgtattttatacttatagcatatctcgaggcaggtctaaattcaattctagacctgcctcaagagctcgag

SEQ ID NO: 1304 - DNA (cDNA), 620 bp; double-stranded, linear
gaattcggccaaagaggcctaaataagtttacttttatttttggtaacactttactgcattgtctgaatattgacaatcagtatgcattatgaagctacctggctaacattgtgtactcactgtgtgtgccaggccctgggttcaatgctctacatgcacttatatttcatttaattctctctgcaacctgagatggtatagccacctcattttacagagttgaaactgaggctcagagactgaaagttaagcctgaggttgcagtcaataagaggcagagctggaactgaaacctacctgtgtctgaccaccagttcgtgttctgacggcaggctagtctgcatcacagagtgtggagtagatggtgcatgcctgctaggatgggctaggtatcactgtaggtaagaaacagccccaaactatggaaatgtacaccaccgaaggctcttttcctgcccatgctgcacatcctccatggctctcctgtgccctgtgccccacatgccctcatcctgccacgagaataaaggagcagcctccatatgggagctgtcagctgctctaagagatgaaggagagagtggcccgtctcaatggctcccaactcttctgcctcgag

SEQ ID NO: 1305 - DNA (cDNA), 736 bp; double-stranded, linear
gaattcggccaaagaggcctacttttggctcaatgttttccaaacttatttgaccccaaaacctttttcatatacccaataataagctacagaactaatattctgcaaatgtctcttggaacacactgccttaaacagatatttctatagctgtcagtatagttatgttgctcccaagcctagttatctccagttgttttaagggtgttatgaaaaattcttaaaatatatatgaatttgtgtaacacacacagagacacacacacatactactttaagggggtgaggatcattaattcagataatttttaagtttcctagtgattctcaatctctttgaattttacttacatttacacacacacgcacacacatatgtatatacacatatcattttaagaagctgaggatcactaattcagataatgtataagtttcccagtgattctcaacctctttgaattttacttataattacatacacacacacactgctacttatataaatgttctcatgtaatcatggtaacagctcaaattcccaaagcaagggaagacttctcattgtcagttaaacctgttaaaacatgaaaatattcattgagcctagttccttgttataaaatacaagaaataagacattcaggcattttccctttatgaagatgttcagtcatcctttccttgaactacaattaggaaaagtatatgtctttattccattgaagttctcgag

SEQ ID NO: 1306 - DNA (cDNA), 511 bp; double-stranded, linear
gaattcggccaaagaggcctacagcaatatgcatcttgcacgtctggtcggctcctgctccctccttctgctactgggggccctgtctggatgggcggccagcgatgaccccattgagaaggtcattgaagggatcaaccgagggctgagcaatgcagagagagaggtgggcaaggccctggatggcatcaacagtggaatcacgcatgccggaagggaagtggagaaggttttcaacggacttagcaacatggggagccacaccggcaaggagttggacaaaggcgtccaggggctcaaccacggcatggacaaggttgcccatgagatcaaccatggtattggacaagcaggaaaggaagcagagaagcttggccatggggtcaacaacgctgctggacaggttgggaaggaggcagacaaactgatccatcatggggtccatcacggggccaaccaggcgggaagtgaggcagggaagtttggccagggagtcgacaatgcactcgag

SEQ ID NO: 1307 - DNA (cDNA), 219 bp; double-stranded, linear
gaattcggccaaagaggcctaatttttccccacaccacaccactgtcctctgtgcctgtggaaaccactcaaatgcctctccccaagccttctttcagtaacaaccatctcatccggttgattactgtagctttcggcctgtataacccctccttatgtcatgcctgtaccagatgttccactgcatctgtatcccaccagattgcacatactctcgag

SEQ ID NO: 1308 - DNA (cDNA), 344 bp; double-stranded, linear
gcactgcgcctggcccttgtggatactttctaggtgatttgaggaggaaaggcacagccatgtctcctaaagttaacaagcactaagctttcccaagtagtgaaatgtcaagcctctgcttctgtcacttatttgttcattcagcagaaagtcactgagagccttctgtacaccaggcacagtgctgggcagtgaaagagacagacatgtccctggatccagggaggagatgaccaagtgatggctgtcaggcccagaccttgctgtttgtctgcagcctcttccctcaggcaacttgttctctatcaggagaaatgaaataattattatctggagctctcgag

SEQ ID NO: 1309 - DNA (cDNA), 565 bp; double-stranded, linear
gaattcggccttcatgcctaaaaagggtcagaggaaggcagtatccttggggtgttgctgaagttgaaaatggtgaacattgtgattttacaatcctaagaaatatgttgataagaacacacatgcaggacttgaaagatgttactaataatgtccactatgagaactacagaagcagaaaacttgcagctgtgacttataatggagttgataacaacaagaataaagggcagctgactaagagccctcgagttgcagggagcccagatcatgccactgctctccagcctgggtgacagagcaagactctgtgccccccccccaccccaaaaaaaaagaaaacaaaaattaaaatctttagttactgtattattcaaaaatgtctactttcaagaaaaactacagccatgcaaagaaacagtaaaatgtgaccatactcaggaaaaaaagcagacaatagaaatggcttctcagtagggctatatgttggatttagcaggcaaagacttcagaggccttttaataagtatattcaaagaattacaggaaaatatgaaaactcgag

SEQ ID NO: 1310 - DNA (cDNA), 104 bp; double-stranded, linear
tgcacagctgtagtaccccaagaagaaaatgttacttctctcatctgggcaaaacccacagaagacttcccagcttctgccacataaaagacacagaactcgag

SEQ ID NO: 1311 - DNA (cDNA), 105 bp; double-stranded, linear
gaattttgcgttctgtttagcatgctatcctgtgtgaaagaaactgaaatccaatattatggagagtatgttaaagccacctctgaaatgaagaccactctcgag

SEQ ID NO: 1312 - DNA (cDNA), 407 bp; double-stranded, linear
gaattcggccttcatggcctaaagggaagggaggtgtgaggaggatggagtaagagtgagaggtcctaagaacatggagggaggctgtgtgtgatcgatggagaaatatggtcctgagagatttcttgtagtcaagaatggccaatacatgtctacctttaactggtattggaaggaagtagtttcctgctctgtgctctaaatactctctattaccctcaagatgtcagcaaaatgtgatacatagcaatcttgtgttagagatgctttaggaattgcagaaaaaccatgctatcaagtggtagggaagtgagtggcaagaggatgtctgtcacagaaactagggatagaggggctggcaatggcagagatgcaggtggagtggactgattaaggggagtctcgag

SEQ ID NO: 1313 - DNA (cDNA), 292 bp; double-stranded, linear
gaattcggccttcatggcctaggtcttgccacattggccaggctggtctcgaactcctgggttcaagtagtcctccacctcagcctctcaaagtactgggattacaagcgttgagccaccctcccagcctttgccttttttttttttttttttttttttaggaggagaattaattgatacatagaccccttaagagaagggatgctatgggcaggaagagattgaaggtaaaggaaaaaggattcagcacccaagcaaaacaattggcctgtgatagaagggcgatctcgag

SEQ ID NO: 1314 - DNA (cDNA), 309 bp; double-stranded, linear
gaattcggccttcatggcctagatccaagaagctcaacagacctcaagtaggataaacacaaacagatcttcactaagtcctactgctgaaagacaaagacgaggagaacatcttgaaagcagtgagagaaaaacaactcattatggagagagcaatgataaaattcttatcagaacagtggaggccagaaggaaatagagtgacatattcaaaatgctgaaggaaaaatttgcaactacaagttctagatccagcaaaattatccttcaagaatgaaggtttagtaaagacattcccagaccctcgag

SEQ ID NO: 1315 - DNA (cDNA), 469 bp; double-stranded, linear
ggccccagctcctgagtagctgggattacaggcatgcaccaccacacccagctaattttgtatttttagtagagacagggtttcaccatgttggtcgggctggtctcaaactcctgacctcagtgatccacccgccttagcctcccagagtgttagaattacaggcgtgagccactgcacccggctgggaaacatttttaaaacggcgcagggttgtccttgaaagtcccaggtttcctcattggccctgccattggcgggtgggtgatttcaggcaggacacgcagtgtctggggaccctggctttctcactggaagacgattgttatggtccagagggtggtaactcaggtgttcatgtctgattctggatgttctctgcagctgctggagtctcctgattggagagcagcaaatgactgttcaatgacagttctagttgtacctctagcacccccactcgctcgag

SEQ ID NO: 1316 - DNA (cDNA), 262 bp; double-stranded, linear
gaattcggccttcatggcctaatctatgtgtgtcaactttcatagaaccctacaccaaaaaaggtgaattttatttcgtgataaattaaaaagtaaaacaaaagagacaaaaatagtaaccagggaagctttcaaaaaatatatgttcttgttcaagaccagcatggccaacatggcgaaatcccatctctaataaaaatagaaaaattagccaggcgtggtggtgggcgcatgtagtcccagctatccagcaccgctcgag

SEQ ID NO: 1317 - DNA (cDNA), 497 bp; double-stranded, linear
gaattcggccttcatggcctaaaggaatggtattttggcaacgcagacaaagaaaggagtggcccgtatggatttcatgagatgcaagaattgtggaccaaaggaatgttaaatgcaaaaaccagatgctgggctcaaggcatggatggatggcgaccacttcagtccataccccagctccgagtcatataaggtaacccagacaaccacctacgaatttaaagctcctataagttgccctttctgcatccgaagtgtgatatttgaaagttaaaaacgttatcttacatacatagatcttaaaacgtatcttacaccacaacctactcacagatgcaaaggcagtggtcgtggtcttccattgcttggggtcctggggccgggtttgaggctgaatgtcagggtttcctttgccataacctcattctgcaccacgtgctgtcagccaggcagccaatgtggacttggaggctggcatctgctgggcactgctcgag

SEQ ID NO: 1318 - DNA (cDNA), 451 bp; double-stranded, linear
gaattcggccttcatggcctaatctggatgtctgtccaaggcctgactgctgaactcctacttttcctacaaaaccctacccacatggcccttcctgcgggaagagatcttgagcctccctggctattaagactctgctgtgcagccttcttttactggactcagggctatcttccccagactagggccttcttgaggacaatcgtggtggcccagtggttgacgctgtctcccctgcatgtagttggtcttcctggttgcttcttgcccctgtggctcccttgggagactgaaactcagaggacagcttctggtctgctgttacatggctcccacagggagactggccccacctgtgccccacccatcacagctagggcctgggatgggtcagacactggaagagcctccccctaggccatgcatatggatcgtgcccacacgcctcgag

SEQ ID NO: 1319 - DNA (cDNA), 477 bp; double-stranded, linear
gaattcggccttcatggcctacactacggtactcccagcatatcacccttaatgtaactttaaataacatggccattttttaaaaaggacacaggaactacataacattttttttcagattttggaaaattctaaatatgtctagaaaaacttttctttctgttccattctccttcctattctccatgaccccctccccgcggactgtatcaggtacagcctgttggaaatccagcaccgcacattaggcacaccagtggtaagtttacttgttgagttatcaccttttttttccttttaatcagagaggcagctctgtgttgaagatgctaggtagtgatggaaaagacattaggaaaatttgttaccgtggtaaccggggatggacatcatgaccttttgtgatatgcatgctgtggccttggtagtctcttcccctaattaacatcctgtgagaaacgtgagagatgactcgag

SEQ ID NO: 1320 - DNA (cDNA), 284 bp; double-stranded, linear
gaattcggccttcatggcctagacggaggctggagattcacatggggcgaggagttgcagaccagcctgggcaaagcatggtgaggccccgtctctgcagaaatgagaaaatgagctggatgtagtggcaccgacatgtggtcccagctgctgggagggctgaggtgggaggattgcttgagcctaggagttcaaggctgcggtgagtagatcgtgccactgcgctccatccctggcaacagagcaagatcatttctcaaaaagaaaaaaaaagccatctcgag

SEQ ID NO: 1321 - DNA (cDNA), 254 bp; double-stranded, linear
gaattcggccttcatggcctagggaaatgtgtgattgggaaagaggcagcttttaaaaatgtgtctggcctttgaccacgcaatttcactttccagtatttattctaggaaaatactcatactattgcaaagtttatatataaagatagttataactgcattgtttatcatttacaaaaagaaaacatctgaaagcccaacaagacggaactggttattccacattggcacattcatacaaggcaatgctcgag

SEQ ID NO: 1322 - DNA (cDNA), 352 bp; double-stranded, linear
gaattcggccttcatggcctaggcacagaaaaattggaaaggattggtggtcgtacatcttgcagctcacttagtagctgcatgcatgtagaccgggtggtgttgatgcagtgttgacttgctggcattggggtgggtggtagcatggtcaagctggctgagtgatgggatattgtctcagaggttggtgcagggaaactctgtgggtgtgtctaatgcaaggataatgacaatgtcctgtctgcctggtctttggggggtcaggtggagatgtccttttggaaaggcagccattctctttgagtgtccagagggcatggtgcaggcacatggattgagtggaggactcgag

SEQ ID NO: 1323 - DNA (cDNA), 440 bp; double-stranded, linear
gaattcggccttcanggcctactgtgtgtagaattctgttttctcatgatattgaagacattattccagtactttgactgctagtattgctgttgaaaagtcttaattgcccttcctttgtaagtaataacccttttatttggctgtgttaagcctttttttttccttcccatttagtgttttgcagttttgtataatgtattgagggcgttatttttttcattccatcattttattttttgtaatcccacttgggattctttgggcttcctggatctgaggataataataatgtctttgaataattgtggaaaattcttaaccattatctctttgaataatgcctcttattttctccttctataactctaattagacatatagtctatttttcatgttacttatgccttttcatcctttttcgtctccacatactcgag

SEQ ID NO: 1324 - DNA (cDNA), 280 bp; double-stranded, linear
gaattcggccttcatggcctaattgaattctagacctgcctaaaatgcccagttacctgaaattgtataaattcttgccaaaagtgtttgaacttaatacaaacttcccatctcttacctcttagcactgtgctcatcttgaggggacatagtcccaattttgtattttatataatactgttaatgaatatgtgtagacttcatatggttgtgggtaagagaatactgcattcagatagaaaagatgctatatagctaagttgatccgcggatcctcgag

SEQ ID NO: 1325 - DNA (cDNA), 281 bp; double-stranded, linear
gtttccttttctacttacaaagaaaataaatagaaatagattttacatgctttatttctttgagacaagccattgtaaattgttactagactaagtagtagtataccagtcattgactggtcttttcaactccactcaaatttgtaaaaagcaattcctcttatactatcatcttttttgttttttaaggtttttgttgttgtttggttttttggcaaaacatgatacatttctcatgcttgatctaaagaggctttacataagagacagagtcgctcgag

SEQ ID NO: 1326 - DNA (cDNA), 348 bp; double-stranded, linear
gaattcggccttcatggcctactatcttgaatgtccaactccaactcctaattattttaaaaatctatgcacttctttcacttgaatttctatgccctcatagactttacaggcacatgttctatcaccaattaagagaaatttaacttacacattttacaacttatacatgcaatttggctgagcttatacagcacagatcaacattacaatcaatttactgccatgttaaaaaaaaaatcagtgaacattgttcggctgacctaattttttgaaataagttggccatcagtgtaattgattgagctatctgtacaacccccaacctacctaagcaaagggctcgag

SEQ ID NO: 1327 - DNA (cDNA), 680 bp; double-stranded, linear
gaattcggccttcatggcctacacggacttacatcctcattactattctgcctagcaaactcaaactacgaacgcactcacagtcgcatcataatcctctctcaaggacttcaaactctactcccactaatagctttttgatgacttctagcaagcctcgctaacctcgccttaccccccactattaacctactgggagaactctctgtgctagtaaccacgttctcctgatcaagtatcactctcctacttacaggactcaacatactagtcacagccctatactccctctacatatttaccactaaccctcgagaccacttcatataaatacttatttatttcctatttcccctgactagaaatataagctccatggtagcagagattctgattgctgcctactctatccccagctcctatactaggcaccatgagtacatgatcagaaaatattcatggaaaaaaatacataaatgtataacaatcttcatttgtgagtaagaagatgggctctggaatcagactgcctggattgaaatcctaacttcatcacttactagtcatgggatattttacctcagtttcactttttgaaaatgaagataataatgtctaccttatagtattgtgaggattaagtgaattaatgcacacaaaattaggccatgaaggccgaa

SEQ ID NO: 1328 - DNA (cDNA), 499 bp; double-stranded, linear
gaattcgcggccgcgtcgactgtcactgagcttcttggctctcttatatatattctttattgtcatttactttggtggacgaagagaaggagagagttggaattgggcctgggtcctcagcactagattggcaagacatattggatatttggaactcctccttaaattgatgtttgtgaatccacctgagttgccagagcagactactaaagctttacctgtgaggtttttgtttacagattacaatagactgtccagtgtaggtggagaaacttctctggctgaaatgattgcaaccctctcggatgcttgtgaaagagagtttggctttttggcaaccaggctttttcgagtattcaagactgaagatactcagggtaaaaagaaatggaaaaaaacatgttgtctcccatcttttgtcatcttcctttttatcattggctgcattatatctggaattactcttctggctatatttagagttgacccaaagctcgag

SEQ ID NO: 1329 - DNA (cDNA), 200 bp; double-stranded, linear
gaattcgcggccgcgtcgaccgctgccaaatgcttcactcctatctactctcccgattccttatacttctgaacctcctcaacagaaatcttgctctctccctaaatcctcagtgcaacatacgtccgcaaaaactaaatgatccctcctcagccagacagaaaactctcaacatatcaacactcccaaggcgtggacag

SEQ ID NO: 1330 - DNA (cDNA), 158 bp; double-stranded, linear
gaattcggccaaagaggcctacagtctttttaggcatgttttttttttttttggtgtgtgtgatgacaggaatatgcattttatctgtagtggttttaaatcctgtattaagcgttgttttcttttcagactgcaaaattcaaaatggggctctcgag

SEQ ID NO: 1331 - DNA (cDNA), 552 bp; double-stranded, linear
gaattcgcggccgcgtcgacgatcatgaagcgctcggtagccgtctggctcttggtcgggctcagcctcggtgtcccccagttcggcaaaggtgatatttgtgatcccaatccatgtgaaaatggaggtatctgtttgccaggattggctgatggttccttttcctgtgagtgtccagatggcttcacagaccccaactgttctagtgttgtggaggttgcatcagatgaagaagaaccaacttcagcaggtccctgcactcctaatccatgccataatggaggaacctgtgaaataagtgaagcataccgaggggatacattcataggctatgtttgtaaatgtccccgaggatttaatgggattcactgtcagcacaacataaatgaatgcgaagttgagccttgcaaaaatggtggaatatgtacagatcttgttgctaactattcctgtgagtgcccaggcgaatttatgggaagaaattgtcaatacaaatgctcaggcccactgggaattgaaggtggaattatatcaaaccagcaaatcctcgag

SEQ ID NO: 1332 - DNA (cDNA), 760 bp; double-stranded, linear
gaattcgcggccgcgtcgacctcagaactatttaaatttagttaaattactattatattttatagtaaatattggtccactttatagctcagaacctaaaaagagaatatgtacccaaacttctctatgtttacaaccaacccagagtttaagattctgaattgtgctttgttttgttaaaaatttaaccaagggtcaggcacagaggctcatgcctataatcccagcgctttgggaggccgaggcgggtggatcacttgagttcaggagttcgggaccagcctggccggcatggtgaaaccccgtctctactaaaaatacaaaagttagccgggtgtggtggcatgtgcctgtggtcccagctgcttgggaggctgaggcaggataatcncttgaacccaggaggcagaggttgcanttgcagtgagccgggattgtgccattgtactccagcctaggcaacaagagcgaaactctgtcttaaaaaaaaaaaagaaaaaaaaattaaccaaggttctcctttctctaaatctagcaatttgttctatttttcagaaataaacttaataattttaatacagattttagctttggcttttttcttactttttagtttgcaaattattttatggtattcctacaaagtagatacaaatttgcattcagaatgcaccttttgtttttctgggtttttttgtttgtttgtttgttttttcagaaaactcatggaaaagtacactgttcacctcagcatctcgag

SEQ ID NO: 1333 - DNA (cDNA), 579 bp; double-stranded, linear
gaattcggccaaagaggcctanaactgggtaaggagcaaaaaaagtgacagaggccaggcgcggtggctcatgcctacaatcccagcactctggccaaatatttgattttaaattcccattgttactgattaaaaaaaaaaaaaatctggaccagttaacctggagatttagaggctatagacacaatttaacatccatacaggcctgtgaacttcatgcagagaacaaacaaacaaacaaaaactctaattcagagtctctcatttcagcttagccaacacatttggagacttaggggccagttctagaagctgcttttacctctagactcggaggggcaggccctgtcaccgaagggaggaaaactcttcttggctgtcagcccggattgaagccacttcgcttcccctggccccagctttcctgcactcttttcaccgtgtctgacacagggcaaaccaccaaccactcaaatgagcaaacaattccagaaaaaagaatccgagataaagaataaccaactaggagtctttccattgtagcctaaaccgtcgattgaattctagacctgcctcgag

SEQ ID NO: 1334 - DNA (cDNA), 521 bp; double-stranded, linear
gaattcgcggccgcgtcgaccaacaagggcaaaggccttgagacacaaaccaactgtgtgggtgtaaaggtaagaaaggccagtgaggccagcatgatgaactgggggagcatggtggctgatttggtcaggaagggaacagaaaccagaccacttgggatcttctagccagagtaaagagactgagtttattcctattgtaatggggagctattcagagaggttaatcatggaagtgatgtgacctgagctacactcttaaaagatgcctctggctgctgtgtggagaatgaaccatgggggcaaaagcagaaacaagaagaccacttaagaggctcttgcaataatttatgtgagaagagtgatcatcttgactagggtggtggtggtagaggaggtgagtggtggtcaggactgagaggagccaacagaatttgctggcttgcttggatgtgggtgatgaggcaaactgagaatccaagatggcaccaaggcttataccctgagcaactgaactcgag

SEQ ID NO: 1335 - DNA (cDNA), 775 bp; double-stranded, linear
gaaattcgcggccgcgtcgacgctcttgagtgagacccaacaagctgcttttcaccaaattgcaatggagcctttcgaaatcaatgttccaaagcccaagaggagaaatggggtgaacttctccctagctgtggtggtcatctacctgatcctgctcaccgctggcgctgggctgctggtggtccaagttctgaatctgcaggcgcggctccgggtcctggagatgtatttcctcaatgacactctggcggctgaggacagcccgtccttctccttgctgcagtcagcacaccctggagaacacctggctcagggtgcatcgaggctgcaagtcctgcaggcccaactcacctgggtccgcgtcagccatgagcacttgctgcagcgggtagacaacttcactcagaacccagggatgttcagaatcaaaggtgaacaaggcgccccaggtcttcaaggtcacaagggggccatgggcatgcctggtgcccctggcccgccgggaccacctgctgagaagggagccaagggggctatgggacgagatggagcaacaggcccctcgggaccccaaggcccaccgggagtcaagggagaggcgggcctccaaggaccccagggtgctccagggaagcaaggagccactggcaccccaggaccccaaggagagaagggcagcaaaggcgatgggggtctcattggcccaaaaggggaaactggaactaagggagagaaaggagacctgggtctcccaggaagcaaacagagactcgag

SEQ ID NO: 1336 - DNA (cDNA), 155 bp; double-stranded, linear
gtagatttagatgtacagatagaggtatgatttttttaaaaggcacctcagtatgggtaatgttatctttcttgtgtttcagtgcacacacatacacacacaccatagatgcaaagtgtgtagaaaatgtattgaaggatacccaggtactcgag

SEQ ID NO: 1337 - DNA (cDNA), 138 bp; double-stranded, linear
gaattcgcggccgcgtcgacattcatgcaaataaatatattactaaaatgctacctgtttctttttcctctttttcttccagttttagtttatgagattgggtcttgctatgctgcccatgctaggcatgaactcgag

SEQ ID NO: 1338 - DNA (cDNA), 249 bp; double-stranded, linear
gaattcgcggccgcgtcgacctaaaccgtcaattcttcccatcttaggtttctctcctcggaagccttctctttagaatcgaacattttctcttctggctttgttcggatggtttctggtctgtttctttcttgctccctcgtggctttcacttctgttttctttcccagaatgacggtcctctcatttgaccgtgtgctttccgaagcacctgctgccaccttgtctcggcgatcccggttactcgag

SEQ ID NO: 1339 - DNA (cDNA), 108 bp; double-stranded, linear
gaattcgcggccgcgtcgacaaaacaacacattttaaagattacgtgcttcttggtacaggtttgtgaatgacagtttatcgtcatgctgttagtgtgcatcctcgag

SEQ ID NO: 1340 - DNA (cDNA), 652 bp; double-stranded, linear
gaattcggccaaagaggcctaatagaaggcattccatatttgttcaatgaattaacaaatgtttttcatattaattgttctgatttttacctccttaggccagcctttattattgccatataagccttctggtagtaccaagatgtattatgttccacaattaagacaaattcctccatctccggattccaaatcagataccaccgttgaaagctcccattcaggatccaatgatgccattgctccagacttcccagctcaggtgctaggcacaagagatgatgacctctcagccactgttaacattaaacataaagaaggaatctacagtaagagggtagtgactaaggcatccttgccagtgggagaaaaacccttgcagaatgaaaatgcagatgcctcagttcaagtgctaatcactggggatgagaacctctcagacaaaaaacagcaagagattcacagtacaagggcagtgactgaggctgcccaggctaaagaaaaagaatctttgcagaaagatactgcagattccagtgctgctgctgctgcagagcactcagctcaagtaggagacccagaaatgaagaacttgccagacactaaagccattacacagaaagaggagatccataggaagaacgacctcgag

SEQ ID NO: 1341 - DNA (cDNA), 817 bp; double-stranded, linear
gaattcggccaaagaggcctacgtgccatttctcttccactatgagaggaccgattgtattgcacatttgtctggctttctgtagccttctgcttttcagcgttgccacacaatgtctggccttccccaaaatagaaaggaggagggagatagcacatgttcatgcggaaaaagggcagtccgataagatgaacaccgatgacctagaaaatagctctgttacctcaaagcagactccccaactggtggtctctgaagatccaatgatgatgtcagcagtaccatcggcaacatcattaaataaagcattctcgattaacaaagaaacccagcctggacaagctgggctcatgcaaacagaacgccctggtgtttccacacctactgagtcaggtgtncctcagctgaagaagtatttggttccagccagccagagagaatatctcntgaaagtgganttgccaaggccatgttaaccattgctatcactgcgactccttctctgactgttgatgaaaaggaggaactccttacaagcactaactttcagcccattgtagaagagatcacagaaaccacaaaaggttttctgaagtatatggataatcaatcatttgcaactgaaagtcaggaaggagttggtttgggacattcaccttcatcctatgtgaatactaaggaaatgctaaccaccaatccaaagactgagaaatttgaagcagacacagaccacaggacaacttcttttcctggtgctgagtccacagcaggcagtgagcctggaagcctcacccctgataaggagaagcacctcgag

SEQ ID NO: 1342 - DNA (cDNA), 476 bp; double-stranded, linear
gaattcggccaaagaggcctagcaccatggacaacccacaggctctgccactcttcctactcctggggatcctcaccctcagagcctcttctggacttcagcaaaccaacttctcctctgccttctcttcagactcaaagagctcttcccaggggctgggtgtggaagttccctccatcaaacctcccagctggaaagttccagatcagttcctggattcaaaagcctctgctggaatctctgattccagctggtttcctgaggccctgagttccaacatgtctgggtccttctggtcaaatgtttctgctgagggccaagatttgagcccggtttcccccttctctgaaacccctggttctgaagtatttcctgatatttcggatcctcaagttcctgccaaagaccccaagccttccttcactgttaagaccccagcttcaaacatttctactcaagtctcccatctcctcgag

SEQ ID NO: 1343 - DNA (cDNA), 726 bp; double-stranded, linear
gaattcgcggccgcgtcgaccaggaaatgaagacattgcctgccatgcttggaactgggaaattattttgggtcttcttcttaatcccatatctggacatctggaacatccatgggaaagaatcatgtgatgtacagctttatataaagagacaatctgaacactccatcttagcaggagatccctttgaactagaatgccctgtgaaatactgtgctaacaggcctcatgtgacttggtgcaagctcaatggaacaacatgtgtaaaacttgaagatagacaaacaagttggaaggaagagaagaacatttcatttttcattctacattttgaaccagtgcttcctaatgacaatgggntcataccgctgttctgcaaattttcagtctaatctcattgaaagccactcaacaactctttatgtgacaggaaagcaaaatgaactctctgacacagcaggaagggaaattaacctggttgatgctcaccttaagagtgagcaaacagaagcaagcaccaggcaaaattcccaagtactgctatcagaaactggaatttatgataatgaccctgacctttgtttcaggatgcaggaagggtctgaagtttattctaatccatgcctggaagaaaacaaaccaggcattgtttatgcttccctgaaccattctgtcattggactgaactcaagactggcaagaaatgtaaaagaagcaccactcgag

SEQ ID NO: 1344 - DNA (cDNA), 484 bp; double-stranded, linear
gaattcggccaaagaggcctagggacagcaatcaagttctaatggtgctcactttttaggtcaccttcatcacagactgctccaaaggcagagcaatgtggaacgaaccagcacatttacttaagatcaaagtatgatacatctctttgagcgcctcacttcacaatagggatccattcattggcttccagatgatgttcacagttcatgtaacactgatactgactttgttccttatgtttagacagcttctctgtctatacttctcagaaacaccatcaaccagaacagagccacttattatccacaaaagttgcatcaaccagcttaccttctgggagggatggatggtacccaaatactcaaactgaatcctatagtgtggagcaaccaaacagaaaacagtccaaggattcaggaaatggtaaaaacattttaaatctaaatagtagttattttcattttgttctgctcccacctcgag

SEQ ID NO: 1345 - DNA (cDNA), 125 bp; double-stranded, linear
gaattcgcggccgcgtcgacatgagtttaatttttttttttttttttacactttacatagaaataggattatgtgggctgggcacagggactgacgcctgtaatcccagcacgtggaggctcgag

SEQ ID NO: 1346 - DNA (cDNA), 760 bp; double-stranded, linear
gaattcggccaaagaggcctagacccagcgtacatactgaatgatctctacatctcagactactgtgtgtggattcagaaagtcaaatccaaaaagttggcagctcttgcagaagccttaaaggaagtctcccttacaaaggcccagctggggttagaactggaagaactagaagcagcagcactgcttgtccaggaggaagaaactgcattaaaagcagcccattcagtttctgggcagcagacactttgctccagctctgaggcaagtgattcggaggactcagacagcagcgtgtcatctggaaacgaagactcaggctcagattcagaacaagatgaactcaaagatagtccatctgagacagtcagttctttgcaaggtccctttcttgaagaaagcagtgcctttcttattgttgatggtggagtacgcagaaacacagccatccaggagtctgatgccagtcagggaaagccacttgcctcttcctggcctcttggagtgtctgggcctctgatagaggagcttggggaacaactgaagactacagttcaggtttctgaacccaagggcaccactgctgtaaaccgcagcaatattcaggagagagacggctgtcagacaccaaataattgactcttaggtggttttattcattgttgagaaatatggtagattgggtttcatttaccgaatgagaattcttcattttcactttgtaatttttcttagtatatagtcagcccacactctcgag

SEQ ID NO: 1347 - DNA (cDNA), 352 bp; double-stranded, linear
gaattcgcggccgcgtcgaccatttcgagagtccgtcttgtaaatgtttggcactttgctactttattgcttctttctggcgacagttccagcactcgccgagaccggcggagaaaggcagctgagcccggagaagagcgaaatatggggacccgggctaaaagcagacgtcgtccttcccgcccgctatttctatattcaggcagtggatacatcagggaataaattcacatcttctccaggcgaaaaggtcttccaggtgaaagtctcagcaccagaggagcaattcactagagttggagtccaggttttagaccgaaaagatgggtccttcatagtaagatacctcgag

SEQ ID NO: 1348 - DNA (cDNA), 251 bp; double-stranded, linear
gaattcgcggccgcgtcgactctaggttttctgattttgatggtaatatggtattctgggaaatatctgtccaaattatcctgatctctgaactcctgctgttgaggtcagtcacttcacacaataccatgatgacagctttatcaagccagatgcttagtcagagctttccaagacccagctttggttttatcagcaaaatccatccttcccaccccccatacacacgccagtttgagactcctctcgag

SEQ ID NO: 1349 - DNA (cDNA), 309 bp; double-stranded, linear
gaattcgcggccgcgtcgacctaaaccgtcgattgaattctggacctcctgtgcaagaacatgaaccatctgtggttcttccttctcctggtggcagctcccagatgggtcctgtcccaggtgcaggtgcagcagtcgggccctagacaggtgaagccttcggagaccctgtccctcagttgtactgtctctctcggcgccatgaatggtcattactggacctggatccggcagaccccgggagggagactggagtggattggatctgtctattataatggaaacagagtgtatcacccctccctcgag

SEQ ID NO: 1350 - DNA (cDNA), 553 bp; double-stranded, linear
gaattcgcggccgcgtcgacaattactaccattgttaagtgtctctttaactaaactcattgtttaaaagttttctccctctctgtttctaaatccaaatttctgctctggaatatatgttagaagagatacatttgttggaatgtttgcatttcttttatgaaatgcagtatcttttggggaatattatgtaaatgaaataccaattattttaaaagagcatttttgtgtgacatagtgctttcacaaactaaaactggaatttctttctttagtctatctatatcttttgaaaatgttgacacagctaagaagaagctgcctgttcatatcttagatggtctgaccctcagctacaaggtatatgctgatattccttgtatgaaccgtgttttctgctaacattaaaacatgcaagtaattggttactttctaattttgtttttgtttcataggtcccatggcccgtggacattgttataagtttggaatgtcaaaaaatttataatcaagtgtttcttctcttattgcaaataaagtgggcatcctcgag

SEQ ID NO: 1351 - DNA (cDNA), 209 bp; double-stranded, linear
gaattcgcggccgcgtcgactttatttcagtggattctctaggattttctatataaaagatgtcatctgatagagtagtttacttcttcgtttccaacctgaatggcttttatttcatctctttcctaactgtcctggctagaacctcctttaccacgttgaatggaagtggcaagaatgaacatccttgtcttgtttctgatttcgag

SEQ ID NO: 1352 - DNA (cDNA), 525 bp; double-stranded, linear
gaattcgcggccgcgtcgacaatggcttttcttccttcctgggtttgtgtactagttggttccttttctgcttccttagcagggacttccaatctctcagagacagagccccctctgtggaaggagagtcctggtcagctcagtgactacagggtggagaacagcatgtacattattaatccctgggtataccttgagagaatggggatgtataaaatcatattgaatcagacagccaggtattttgcaaaatttgcaccagataatgaacagaatattttatgggggttgcctctgcagtatggctggcaatataggacaggcagattagctgatccaacccgaaggacaaactgtggctatgaatctggagatcatatgtgcatctctgtggacagttggtgggctgatttgaattattttctgtcttcattaccctttcttgctgcggttgattctggtgtaatggggatatcatcagaccaagtcaggcttttgcccccacccaagaatgagaggctcgag

SEQ ID NO: 1353 - DNA (cDNA), 286 bp; double-stranded, linear
gaattcggccttcatggcctaggctcctaaaataaataatccacataattgtaaatgaaacacatcaaggatttgagttaatagcctctgagcagcattaatatagccattagactggagtatttgttatcaagagggccagagaacccaccgctaaagccgtagggtgggaggaaccctggattgcagctacatggcttatgtagggagtttgtaacagccccaagctgaaaccagcttctacacccatgactgttgagtgattgaattctagacctgcctcgag

SEQ ID NO: 1354 - DNA (cDNA), 572 bp; double-stranded, linear
gaattcgcggccgcgtcgaccaacaagagcactggccaagtcagcttcttctgagagagtctctagaagacatgatgctacactcagctttgggtctctgcctcttactcgtcacagtttcttccaaccttgccattgcaataaaaaaggaaaagaggcctcctcagacactctcaagaggatggggagatgacatcacttgggtacaaacttatgaagaaggtctcttttatgctcaaaaaagtaagaagccattaatggttattcatcacctggaggattgtcaatactctcaagcactaaagaaagtatttgcccaaaatgaagaaatacaagaaatggctcagaataagttcatcatgctaaaccttatgcatgaaaccactgataagaatttatcacctgatgggcaatatgtgcctagaatcatgtttgtagacccttctttaacagttagagctgacatagctggaagatactctaacagattgtacacatatgagcctcgggatttacccctattgatagaaaacatgaagaaagcattaagacttattcagtcagaactcgag

SEQ ID NO: 1355 - DNA (cDNA), 269 bp; double-stranded, linear
gaattcgcggccgcgtcgactgaaaagtaggtttttgaagagatatattcgaaatatattttttcacttgaaaaaagtaaaaatttttttcaaaagcaaataattcaactctaaaattatactatttcaacattctcatttatgtgaaagcatgtgataaattgttgctgcgtcagagatatgagaaactcctttgcattaggtgggcattattcatagacttctacatgaaagagaagagaaataaaagatgcaccaggattctcgag

SEQ ID NO: 1356 - DNA (cDNA), 713 bp; double-stranded, linear
gaattcgcggccgcgtcgaacccagcaaaatggggatctccacagtcatccttgaaatgtgtcttttatggggacaagttctatctacaggtgggtggatcccaaggactacagactacgcttcactgattccctcggaggtgcccttggatacaactgtagcagaaggttctccatttccctcggagttgaccctggagtcaactgtagcagaaggttctccgatttccttggagtcaaccctggagtcaactgtagcagaaggttctctgattccctcagagtcaaccctggagtcaactgtagcagaaggatctgattctggtttggccctgaggctggtgaatggagatggcaggtgtcagggccgagtggagatcctataccgaggctcctggggcaccgtgtgtgatgacagctgggacaccaatgatgccaacgtggtctgtaggcagctgggttgtggctgggccatgtcagctccaggaaatgcctggtttggccagggctcaggacccattgccctggatgatgtgcgctgctcaggacacgaatcctacctgtggagctgcccccacaatggctggctctcccataactgtggccatggtgaagatgctggtgttatctgctcagctgcccagcctcagtcaacactcaggccagaaagttggcctgtcaggatatcaccacctgtacccactagactcgag

SEQ ID NO: 1357 - DNA (cDNA), 925 bp; double-stranded, linear
gaattcggccaaagaggcctagaataatgcatatactgccatgtcagattcctacttacccagttactacagtccctccattggcttctcctattctttgggtgaagctgcttggtctacggggggtgacacagccatgccctacttaacttcttatggacagctgagcaacggagagccccacttcctaccagatgcaatgtttgggcaaccaggagccctaggtagcactccatttcttggtcagcatggttttaatttctttcccagtgggattgacttctcagcatggggaaataacagttctcagggacagtctactcagagctctggatatagtagcaattatgcttatgcacctagctccttaggtggagccatgattgatggacagtcagcttttgccaatgagaccctcaataaggctcctggcatgaatactatagaccaagggatggcancactgaagttgggtagcacagaagttgcaagcaatgttccaaaagttgtaggttctgctgttggtagcgggtccattactagtaacatcgtggcttccaatagtttgcctccagccaccattgctcctccaaaaccagcatcttgggctgatattgctagcaagcctgcaaaacagcaacctaaactgaagaccaagaatggcattgcagggtcaagtcttccgccacccccgataaagcataacatggatattggaacttgggataacaagggtcccgttgcaaaagccccctcacaggctttggttcagaatataggtcagccaacccaggggtctcctcagcctgtaggtcagcaggctaacaatagcccaccagtggctcaggcatcagtagggcaacagacacagccattgcctccacctccaccacagcctgcccagctttcagtccagcaactcgag

SEQ ID NO: 1358 - DNA (cDNA), 172 bp; double-stranded, linear
gaattcgcggccgcgtcgacaaataaacccagcaacttcattcatttgccttatgtttattgagggcctgctagtgctgggcactgttctaggccctgggaatttattagtgagcaaaacagcaaaatctctgtcctcatggagctcacaatatagtagggaacgactcgag

SEQ ID NO: 1359 - DNA (cDNA), 770 bp; double-stranded, linear
gaattcggccaaagaggcctaagtcagtgaggtggagtccgtttttgaggtcacgcggctagtaattggagcctggtttagaaccaagtcagtctcattccagaatccagaaccagtgatttgtaactgatgcacttgtctccaaagggatccagcactgggttttctcatttttaatgcatccattccttaaagcctctgttcacagtcacaaggtgtactttttaaaggaacacagcacacaaatgtgaccgctagtggacagcagtggcagcccagttggatggcagagcctggcatgccgactgggacagaagccccagcacacggtgtgatgatggcgtctccaggctgacctccatggcctcaggaatcaaagtcctcggtctctttcacgcggggttcagaaagaaaactcggctatcttacatctcctctcccctgtttatttgactaaagtgaagttcatgtggcttgagcctcgtttcctggggaaatcagcctggcttaggattccattgtcttctgggactgggaagatgtggaaggctgacctcacgcccagctgaaggtcaccttcccagactctgagctcggctgccttctgcatcgccacggctggagggcctggcccaggccgtggctgcatgctggctttccactgtctcggtgtccctgctgcctgtcagtaatgtgcccagcaccttctggtgtcatgtcccctcttgtttgtgattcttttcctgagctagtccattttctacctcgag

SEQ ID NO: 1360 - DNA (cDNA), 505 bp; double-stranded, linear
gaattcggccaaagaggcctactcagtggaaacctttaaaccctaaaatccaggaaaagaaaataaatacattatcatggacctgagggatttttacctgttggctgctctgattgcctgtttaaggctggattccgcaatagctcaagaacttatttacactattagagaggaattgcctgaaaatgtgcccataggaaacataccaaaggatctgaacatttctcacatcaatgctgccacagggaccagcgccagccttgtctacagactggtttctaaagctggggatgcccctttggtgaaagtatccagcagcactggggaaattttcacaacctccaacagaatagacagagaaaaactctgtgctggcgcctcatatgctgaggagaatgagtgtttctttgaacttgaggtggtgatcctccccaatgatttcttcaggctgatcaaaataaaaataattgtcaaggataccaatgataatgcccccaatctcgag

SEQ ID NO: 1361 - DNA (cDNA), 553 bp; double-stranded, linear
gaattcggccaaagaggcctaaatttgttctctccaaaccagaagaccttaggtacagatgaccccagggagctgggacagcaggacaganaggggaagggacaggtccatatataggtgtgtcattgcagccactgcaatgaacataacatgcaagaaatgtacagaatgtggtccagaattgcccactggtgtcctgtgccctggtggaccccacagaggactgccccaggctttcactttccttccccatggattgagcaagctcccagggcaggatgggtggccaggaggggcagaacgctggcggggacggggaagccaagtgctcacaggaccatccaccacagctgcagccacactgcaagacggcggggatgggacacacggtctagttcttagttctgcctcctacaggcagcccctgctgtcactccagaactaattctctgtgtgccactcactcgcgtgtgtgacacacaacagatacacatacatagacacatacgtacatctcctcccccaatctcaccctctcaccacgcccctcgag

SEQ ID NO: 1362 - DNA (cDNA), 855 bp; double-stranded, linear
gaattcggccaaagaagcctagtcaacttgatccaaacctgttggtgaagcagcagactccaccatctcagcagcagccactccatcagccagccatgaagtctttccttgacaatgtcatgccccacactacacctgagctgcaaaaagggccatcaccaataaatgctttcagcaacttccctataggcttgaactcaaacttgaatgtaaatatggatatgaacagtattaaagagccacagtccagactaaggaagtggacgacagtggacagcatttctgtgaacacatctttggatcaaaactccagcaaacatggtgctatttcaagtggtttcaggctggaagagtctccatttgtnccctatgactttatgaacagcagtacttcaccagccagtcctccaggttcaataggagatggctggccacgtgccaaatcgcctaacggctctagcagtgttaattggccaccagaatttcgtccctggtgagccatggaaaggttatccaaacattgaccctgaaactgacccttacgtcactcctggcagtgtcataaacaatctttcaattaatactgtgcgggaagttgaccacctcagggacaggaacagtgggtcatcctcatccttgaacaccacgctgccttcaactagtgcctggtcatccattcgtgcctccaactacaacgttcccctcagcagtacagcacaaagcacttcagccagaaatagtgattccaaattgacatggtctcctggttcagttacaaacacctctctggctcatgagctgtggaaggtccctttgccacctaaaaacatcactgctccgtcccgccacctcgag

SEQ ID NO: 1363 - DNA (cDNA), 646 bp; double-stranded, linear
gaattcggccaaagaggcctacaaaaagtacatagtaagactaagataccaagttgtatactaatatttttcaggccttgggcctcaaatatatatatttatatataatactccagtgtgaacagcaattcgatgaaatgtaaaatgtatctttttttttttaaatcacacacaagtattcataaccacagggttcaccagaaatctaaagcaaggagacactcactcatatagaaatggagttactcttccacagatcgttctgatcaaaggttttggaacagaaatgaattaatgatttttttgtataatatccaacatgtccactatcaaatacatttagtatgaaaaaacagatgaagaaaaggaacatacattaggacaaagtatctggttaaaatgctgttcatttaaataaagcccactctccttactttagagctccttggtgaaatggaggtgagtttgatggagtgcagttgatgaccactgaaaaacacgagccctttcaacaatgttgcaacactgttagtttttggtttaaacacacacacacactcacaaatgctaagtgtacactaccaaattctgcggtcagcttttccaagaactactggggaaagtttcaatgctgcaaatcctcgag

SEQ ID NO: 1364 - DNA (cDNA), 502 bp; double-stranded, linear
gaattcggccttcatggcctaatggcttagctgaaggaaatgctccagaaattggactgtgtaaaccatcagtacaataatacgctgtgtatgtatgtgtatataaaatgagaattatggcataattggagcatttgcattaatcaacaaactcacattgagacaaaacttagttttacagctgtcttgattaaagccaagtgttccatgttgctgtgaagaatagcctctttcaaatactttggaaagtagttacttggaaacttgtaaaggtattacatttttatatttaaacacctatagagatcttcaattccttgagtctgagcttgtgggtggaattctaaatttgtatcataatctgtcttttgtgaaacattttgaaaatatgtatatataatattgtatatgcaaattgtgttgtttcacttgtaaagggaaaaggcttatttttctttatatttctgataacttgttttgcatatgaccggcacttctcgag

SEQ ID NO: 1365 - DNA (cDNA), 197 bp; double-stranded, linear
gaattcggccttcatggcctacagaagtacgggaaggcgaagaaaagaatagagaagatagggaaattagaagataaaaacatacttttagaagaaaaaagataaatttaaacctgaaaagtaggaagcagaagaaaaaagacaagctaggaaacaaaaagctaagggcatcgattgaattctagacctgcctcgag

SEQ ID NO: 1366 - DNA (cDNA), 314 bp; double-stranded, linear
gaattcggccttcatggcctaggcctggggtgggacattttgtttgtgagaagcctggacaagaggacgaggtgcacaccatgtcagtcacggatttgtgaactcacaggagagggttggatagggcgtgtgaacgtgagcccgcggtgtagacgatgtgaagctgtggtaacgggtgggcttgtgatggcacccgctgctcgcaggagagggttggatagggcatgtgaacgtgagcctgcaatgtagacgatgcgaagtcgtggtaacgggtgggcttgtgacggcacccgctgcttgcagcctaactcgag

SEQ ID NO: 1367 - DNA (cDNA), 250 bp; double-stranded, linear
gaattcggccttcatggcctactggtcccatttttctattgcagtggtcatcatttttattgatgtataataatattgtatcataaatcttcataatatgtgcttccaaagttttttctaatttttcactaacctttgatttggtatttaatttttagttgtcagaagtttttaatatttgtatcatcaaagctatcaggttattaaaattgacttctcatttagacatacttaggccatgaaggtcgag

SEQ ID NO: 1368 - DNA (cDNA), 261 bp; double-stranded, linear
gaattcggccttcatggcctagtgagagcaccacacaaaggacaggaaaaacaccagcaatacatcagctttacacagcaggcaagtttcctgctctctacaagtacagatggaacttgtcttgtgaattaacatcctgactacttttgttgatcatcacattttttcctcatgagagaaataatagtgttttataggctcctgagaataggtttactaaagtcatcgagatctgggttcaaatgacacttcatgctcgag

SEQ ID NO: 1369 - DNA (cDNA), 408 bp; double-stranded, linear
gaattcggccttcatggcctagtttttgtttgtttgtttgtttgttttttggcaagaacagttaggaaccagatcacagtgaggtatagagtgaatgagagttgagaatgtaaagacaatggatatagatcactatttcaggaagctgtttgtgagagggaggagaaaaataaaacagttactgagcaatagggtggttggtaagggggagggatttttttctgaaagatgggagaaattttaacatacttaaatttgatgggataagccatgcacttataggcattcagtcaatatatatttcacaaatgaatgaagataaattagggagaggttaattggagattttaggagagagggaataattgatcatgtaaagtcattgataaggtgggagcagaactcgag

SEQ ID NO: 1370 - DNA (cDNA), 369 bp; double-stranded, linear
gaattcggccttcatggcctactcgattacaggtctcccgcctgccatgcagaaagtcatgtataagggactcgtccccgaggataaaacattgagagaaataaaagtgaccagtggggccaagatcatggtggttggctccaccatcaatgatgttttagcagtaaacacacccaaagatgctgcgcagcaggatgcaaaggccgaagagaacaagaaggagcctctctgcaggcagaaacaacacaggaaagtgttggataaaggaaaacctgaagatgtgatgccatctgttaagggggcccaggagcgcctgccaacggtaccgctgtccggcatgtacaataaatctggaggaaaagtctcgag

SEQ ID NO: 1371 - DNA (cDNA), 443 bp; double-stranded, linear
gaattcggccaaagaggcctattttttttttttttaactgatagatggtgcagcatgtctacatggttgtttgttgctaaactttatataatgtgtggtttcaattcagcttgaaaaataatctcactacatgtagcagtacattatatgtacattatatgtaatgttagtatttctgctttgaatccttgatattgcaatggaattcctactttattaaatgtatttgatatgctagttattgtgtgcgatttaaactttttttgctttctccctntttttggttgtgcgctttcttttacaacaagcctctagaaacagatagtttctgagaattactgagctatgtttgtaatgcagatgtacttagggagtatgtaaaataatcattttaacaaaagaaatagatatttaaaatttaatactaactatgggatctcgag

SEQ ID NO: 1372 - DNA (cDNA), 770 bp; double-stranded, linear
gaattcggccaaagaggcctacttccggctggagctgctgggcgcgggacctggggcggttaatttggagtggcccctggagtcagtttcctacaccatccgaggccccacccagcacgagctacagcctccaccaggagggcctggaaccctcagcctgcacttcctcaaccctcaggaagctcagcggtgggcagtcctagtccgaggtgccaccgtggaaggacagaatggcagcaagagcaactcaccaccagccttgggcccagaagcatgccctgtctccctgcccagtcccccggaagcctccacactcaagggccctccacctgaggcagatcttcctaggagccctggaaacttgacggagagagaagagctggcagggagcctggcccgggctattgcaggtggagacgagaagggggcagcccaagtggcagccgtcctggcccagcatcgtgtggccctgagtgttcagcttcaggaggcctgcttcccacctggccccatcaggctgcaggtcacacttgaagacgctgcctctgccgcatccgccgcgtcctctgcacacgttgccctgcaggtccacccccactgcactgttgcagctctccaggagcaggtgttctcagagctcggtttcccgccagccgtgcaacgctgggtcatcggacggtgcctgtgtgtgcctgagcgcagccttgcctcttacggggttcggcaggatggggaccctgctttcctctacttgctgtcagctcctcgag

SEQ ID NO: 1373 - DNA (cDNA), 597 bp; double-stranded, linear
gaattcggccaaagaggcctagtctctttgaagatctctaggaacttgctttatgaatcttcatgctcctgtgttggatgcatatacatttaggatagttaggtgttctttttgaattgaaacttttaccattatgtaatgcccttgtttgtcttttaaaatttttgttggtttaatatctgttttgtctaaaattagaatttcagcctctgctttttttctgttttccatttgcttaataaatttttcttcattcccttatttttagcctatgggtgtcattggatgtgagattcatctcttgaacactgtactactggttcttgcttttttactcagcttgtcactctgtgtctttcaattgggcattcaaggctagtgttgatatgtgtgaatttgtttctgtcatcatgttattagttgtttattatgctgacttgtttgtgtggtttcnttatagtgttactggtctgtgcacttaagtgtgtttttttagtagcaatattttcttttcatatgtagtgctttatgcgaggtattttgcaaggattttctgaatnntcngaatttttatgtgggctaaactaggggctcgag

SEQ ID NO: 1374 - DNA (cDNA), 459 bp; double-stranded, linear
gaattcggccaaagaggcctagcctcccagtgtgagccaccgcacccagcctggattgttgaattcaatgcttgggtcacctccagattcattttcacagtctttcatgttttggtcatatgacattgtattttgctgccatatgactgatctttttttgttaaatgtgagatacttgttaaaaaatgtttagcaatgaattgaggcctagtagcatgttatcttgctgcagaagagatgggagtctacttctgggggatggtcaggggtcctccatacaggctgcaattgaagtcgtcggtgcaggctcagtccctacaaaggccagggtatttcctgtccacctttattctgatgcatgactcttctgggtctcaaccagagccagtggacttcagtatgggtcgctttcattggcagaccctcaatccacttgttttccatctaatcccactcgag

SEQ ID NO: 1375 - DNA (cDNA), 531 bp; double-stranded, linear
gaattcggccaaagaggcctaatggatctcatgtgcaagaaaatgaagcacctgtggttcttcctcctgctggtggcggctcccagatgggtcctgtcccagctgcagctgcgggagtcgggcccaggactggtgaagccttcggagaccctgtccctcacctgctctgtctctggtggctccatcagcagcaatagttactcctggggctggatccgccagcccccagggaaggggctggaatgcattgggagcatctcttacagtgggagcacctacctcaccccgtccctcaagagtcgagtcaccgtttccgtagacccgtccaagaaccagttatccctgaggctgagctctgtgaccgccgcagacacggctgtgtattattgtgcgggggggtctccgggcgattattcctatgagaatagtgattaccccgaccccccgtactatttagactcctggggccggggaaccctggtcaccgtctcctcagcttccaccaagggcccatccgtcttccccctcgag

SEQ ID NO: 1376 - DNA (cDNA), 661 bp; double-stranded, linear
gaattcggccaaagaggcctaatgactcagaagaaagaagttactttaccatttttgtttacaccatttaaactgctttctgattccaaacagttcaacattttaagaaaagcaagatcttatataaaacacagaaagtttgatgaagtggtctccctttgcaaggagctaattcatcttgcattgaaaggattgtcctattatcacacatatgacagattctttttgggcgtcaatgttgttattggttttgtgggatggatatcttatgcctctttgttgatcatcaagtctcattccaaccttataaaaggtgttagtaaagaagtgaagaaaccaagccatctcctgccttgtagttttgtagctattggcattttagtagcattttttctgctgattcaagcctgtccctggacatattatgtatatggtttgttgccactgccaatatggtatgcggttctaagagaatttcaagttattcaggaccttgttgtatcagtgttgacctatcctctgagccattttgttgggtacctgttagcctttaccctgggaattgaagtattagttctcagttttttctaccgctatatgcttaccgctggacttactgcctttgcagcttggccatttctcactcggctgtggactcgag

SEQ ID NO: 1377 - DNA (cDNA), 117 bp; double-stranded, linear
gaattcgcggccgcgtcgacaaaaaaggtaaagatgttgctgtatgcaaaatggacccaagttatgtttattcaagttgcctgtagaaacttagtgctctatagccacaaactcgag

SEQ ID NO: 1378 - DNA (cDNA), 118 bp; double-stranded, linear
gaattcgcggccgcgtcgaccttaaatttaaaactggcctggtttgccttttttatcaagagagcttaacagataaaaaatgaaattagtctattttctacttgccagcagtctcgag

SEQ ID NO: 1379 - DNA (cDNA), 229 bp; double-stranded, linear
gaattcgcggccgcgtcgacattttatataatattttaaataagtttgtgtacaaaacaaagatttgactgcattttgattgtgaccccgttgcatgaagtcaggtgtggagttttccacttgtggtatcatgttgctgctgctcaagaagtttctgattttggaacattttggattttggattttcacattggggatacctaatgtgagagagactaggccactcgag

SEQ ID NO: 1380 - DNA (cDNA), 140 bp; double-stranded, linear
gaattcgcggccgcgtcgacgttggggacatggtgggtctgagaaaagtgttgcccgcaactttctatctggcattccctgcggaggaaatagaatgcgcgctctccgacagcatttcctgtaacatccgcgaactcgag

SEQ ID NO: 1381 - DNA (cDNA), 99 bp; double-stranded, linear
gaattcgcggccgcgtcgactctcagaagaggtttgtttaacttctataaatacaaccacttcatgcgttggcatctccttgagaaaaggcttctcgag

SEQ ID NO: 1382 - DNA (cDNA), 442 bp; double-stranded, linear
gaattcggccaaagaggcctagtttaagtgctgtggagtagtatatttcactgactggttggaaatgacagagatggactggcccccagattcctgctgtgttagagaattcccaggatgttccaaacaggcccaccaggaagatctcagtgacctttatcaagagggttgtgggaagaaaatgtattcctttttgagaggaaccaaacaactgcaggtgctgaggtttctgggaatctccattggggtgacacaaatcctggccatgattctcaccattactctgctctgggctctgtattatgatagaagggagcctgggacagaccaaatgatgtccttgaagaatgacaactctcagcacctgtcatgtccctcagtagaactgttgaaaccaagcctgtcaagaatctttgaacacacatccatggcaaacctcgag

SEQ ID NO: 1383 - DNA (cDNA), 501 bp; double-stranded, linear
gaattcggccaaagaggcctattcaggtgttttcatttggtgatcaggactgaacagagagaactcaccatggagtttgggctgagctggctttttcttgtggctattttaaaaggtgtccagtgtgaggtgcagctgttggagtctgggggaggtttaatacagcctggggggtccctgaggctctcttgtgcagcctccgggttcatctttagcaactatgccgtgagttgggtccgccaggctccagggaaggggctggagtgggtctcaagtataagtgacattggtgacaccagatactacggagactccgtgaggggccgattcaccatctccagagacaattccaagaacatgttgtatttggacatgaacagcctgagagccgaggatacggccgtgtattattgtgcggcaagggattggtatcatactcgtggctattactggtactactttgacttctggggccagggatccttagtcagcgatctcgag

SEQ ID NO: 1384 - DNA (cDNA), 634 bp; double-stranded, linear
gaattcggccaaagaggcctacttcaatattctgttacgggtttttttagtctttttttctctttgctttcctgtgttggaattttctatttctatatactcaagttcagagattctttccttttccatatcctgtctactagtgagcccatccaaggcattgttcatttctgttacagtgttttgatctttagtatttctttttcattcttcattacactttctctctgctaacattgcccataagtgcttatatgctgtatactttatctgttgatcatatttgttttaaattcctaatctgataattcaacatctctgacatgtctggttctggttctgatacttgttgtcaaactgtggttttttttcttttagagtggcttttaattttctttttgttttttgttttttttttggatagttggacatgacgtactagataaaagcaactactgtaaatagacctttaggaatgtggtggtaagatgtgagaggaagaaaagcattctgtagtcctgttaggtttcagtcttttaacccatttatgcttagtgttctattactggaacgctaggcatgtggaagttatttatatcctactgctaaaggttatcaccaagctgtactcgag

SEQ ID NO: 1385 - DNA (cDNA), 700 bp; double-stranded, linear
gaattcggccaaagaggcctactcaagttcaaggaaaatgaagacaaaaagtgatatgatggaagaaaacatagatacaagtgcccaagcagttgctgaaaccaagcaagaagcagttgttgaagaagactacaatgaaaatgctaaaaatggagaagccaaaattacagaggcaccagcttctgaaaaagaaattgtggaagtaaaagaagaaaatattgaagatgccacagaaaagggaggagaaaagaaagaagcagtggcagcagaagtaaaaaatgaagaagaagatcagaaagaagatgaagaagatcaaaacgaagagaaaggggaagctggaaaagaagacaaagatgaaaaaggggaagaagatggaaaagaggataaaaatggaaatgagaaaggagaagatgcaaaagagaaagaagatggaaaaaaaggtgaagacggaaaaggaaatggagaagatggaaaagagaaaggagaagatgaaaaagaggaagaagacagaaaagaaacaggagatggaaaagagaatgaagatggaaaagagaagggagataaaaaagaggggaaagatgtaaaagtcaaagaagatgaaaaagagagagaagatggaaaagaagatgaaggtggaaatgaggaagaagctggaaaagagaaagaagatttaaaagaagaggaagaaggaaagctcgag

SEQ ID NO: 1386 - DNA (cDNA), 127 bp; double-stranded, linear
gaattcgcggccgcgtcgacctttagtgtgtcttttcattctctaaaaagtgtcctttgcagagaaaaaaaaaattttaattttgatgaaatccaacttatcaatttttcttctgtggcccctcgag

SEQ ID NO: 1387 - DNA (cDNA), 128 bp; double-stranded, linear
gaattcgcggccgcgtcgacctctgttcagtcgttttgctgaatatttattagcattccatcactttgtgtttaattaatagaagttgagttcaaacaatgtttttaaaattcacacaaatactcgag

SEQ ID NO: 1388 - DNA (cDNA), 816 bp; double-stranded, linear
gaattcggccaaagaggcctagtttcttttgctctacatcttcaccagtatttggtgttatcagtgttctgaattttgtccattctgataggtgtgtagaggtatcttataattttaatttgtgtttctctgatgccatatgatgtgtgggacatcttttcatatgctgaattgccatctgtatatctttggtgaggtgtctgttaaggttgttggccaattttttaattgggttgtttgttttcttgtggaattttaagagttccttacactgtctctgtctgtcttgtctgtctgtctgtctgtctgtngagacagagcctcgctctgtcacccaggttgcagtacagtggcacagtcttggctccctgcaacctctgccacctgggttcaagtgattctcctgcgtcagcctcccgagtagctgggtttatacccgtgcaccaccacacctggctaatttttgtatttttagtagacacggggtttcactangttagccaggctggtctcgacctcctgacctcaggtgatccacccaccttggcctcccaaagtgctgggangngagccaccacacccagcctccttacacattttagttaatagttctttatcagatgtgtcttatgtaaatatttcctccctatctgtggcttgtcttttcatactcttgacattgtcttttgcaaaagacaacaatttttaagaaacaagtagacaattttaatgaagtctggcttatcagttcttttcttcatggttggtacctttggtgccgtatctaaaagtcatcaccaaacccaagaactcgag

SEQ ID NO: 1389 - DNA (cDNA), 163 bp; double-stranded, linear
gaattcgcggccgcgtcgacctaaaccgtcgattgaattctagacgaactatatgtttaagcaaaaacaaaaataaaaatcctcaaaaaaagtaatatcagagttttaatttcaaccagctggcacaacaatgaaagtgtcagactttctgaaagtactcgag

SEQ ID NO: 1390 - DNA (cDNA), 286 bp; double-stranded, linear
gaattcggccttcatggcctaaaaccctcaaaaataaattagaatccagcactgctacaatatattatctaaaatgtctaattctcaaaaatatgagtgatgcaaagaaacaggaaacagtgaaacacagaggaaaaaacagtgactagaaactgacttaagagtaagcccagatgtatttgggagccagagccttcaaagtagctattaaatatgttcgaaaaaattaagggaaaatatgacaatgactcaaaaataaggactctaaatatagaaatgggagctg

SEQ ID NO: 1391 - DNA (cDNA), 392 bp; double-stranded, linear
gaattcggccttcatggcctacttttaagggcttggaagtttcaaaaccacagtctgcatgtgacaggtgctcactgctgttgggttggccgctggttctaggcctctgctggagtgtgtgatctgctttctgacggcagggcgttcacatgggtgtgctttaatcttacgtctccgtcctctttttccactgagagtgctggtctcaaggacagtggagatgagagaattggaatatcgcataatgtctcatctgttttatctcttgctacaaacatcacaatctcaaaataacaatggcagtacaactgccacctatatcattactgaaaacagtgaagatattttttgcctaagtcttcccattctgtgtagttatgcagagtctcgag

SEQ ID NO: 1392 - DNA (cDNA), 286 bp; double-stranded, linear
gaattcggccttcatggcctagtaatctttccccccagtttttggatgaagaaactaacactgaaggggcgaggtggcctcccaggctcagagggtgattcagaatccaggcctggtgttccttccacagtaccaaagcgccacacattagttgtcttgtagattttccacacttcagggagaatgccaaagtatctttgccttgcacacactacctgttcaacactcagtgacgagggtgtcgtgtgtgctcaggcaactcccgcccttcttccttttgctcgag

SEQ ID NO: 1393 - DNA (cDNA), 320 bp; double-stranded, linear
gaattcggccttcatggcctactgagttctcaaatctaacgttttaggaattttttattcctgcagagagttggggagctgtttaaaagttggttggtttagccagtatagctagattcctcaaggtcaacacaacgccatactgctctagctggggctagatttctcatgatagtctaaactgtgtgatggccaagtccccactttgaagatgtccaaattcagcctcagacatttctcctcaagaaagggggggcaaaaaagccttttgtgcccctttcccaaattatttgctcatgtcgcaagactgaggtctcgag

SEQ ID NO: 1394 - DNA (cDNA), 450 bp; double-stranded, linear
gaattcggccttcatggcctaacgccatctacgacctgatcgagcgcatcgaggatttggcgctgcagaaccagatccgggagcacgtcatctccatcgaggactcgtttgtgaacagccaggagtggacgctgagccgctccgtaccggagcttaaagtgggcatagtggggaacctgtctagcgggaagtcagccctggtgcaccgctatctgacggggacctatgtccaggaggagtcccctgaaggggggcggtttaagaaggagattgtggtggatggccagagttacctgctgctgatccgagatgaaggaggcccccctgagctccagtttgctgcctgggtggatgcagtggtgtttgtgttcagcctggaggatgaaatcagtttccagacggtgtacaactacttcctgcgtctctgcagcttccgcaacacccctcgag

SEQ ID NO: 1395 - DNA (cDNA), 276 bp; double-stranded, linear
gaattcggccttcatggcctaccgtcattcattgcagggaccatcaaaccccagacaatcctattttggtgggaaatctagcagatagagaagccaaacaagtagccctacaacctgtacaaggccagtttctgtgcctgtcctcgttctctcctctttactctccagaagaaaaggaggactaccaagcccaaaaccttcaaaaacaaggaccatggtatgtcaaggaagggtgcttccttcttcctcactctcaaacaatctctatccttcgag

SEQ ID NO: 1396 - DNA (cDNA), 241 bp; double-stranded, linear
gaattcggccttcatggcctagggggcggggggcggggcgggtctcagaaatcaggagtaactctttgaaaactaaatagtttaaaatctcatccaacttccacctaacttacatgcctggttaaccgacactctgtatatcctgtataaaacattctaactgatgcccacgacatactattggctgatggttttgctagtatacagtatggccacttactgccattcccatgccctcgag

SEQ ID NO: 1397 - DNA (cDNA), 314 bp; double-stranded, linear
gaattcggccttcatggcctagaaaatgaagaagaagatcatcaaggaccagaaactgcttgtgatcgtggggggcatgctgctgatcgacctgtgtatcctgatctgctggcaggctgtggaccccctgcgaaggacagtggagaagtacagcatggagccggacccagcaggacgggatatctccatccgccctctcctggagcactgtgagaacacccatatgaccatctggcttggcatcgtctatgcctacaagggacttctcatgttgttcggttgtttcttagcttgggagacccgcaactctcgag

SEQ ID NO: 1398 - DNA (cDNA), 342 bp; double-stranded, linear
gaattcggccttcatggcctagtgcacaccaagaaccaagtttcagcttggttactgtgttgaagacacctttgctatatttcaagtcattccttcttttctcaattttttttaattgacaaaaattttatatatcgtgtacaacatcaatccatcttggcatctgtatttgtcagggttgtcttagagggacagaactaataggatatatataagggggagtttattaagtattaacttatataatcacagggtcccacaacaggctgtctgcaagttgaagagcaaggagagccagtcagagtgccgaaactgaagaacctggagtccgatgttctcgag

SEQ ID NO: 1399 - DNA (cDNA), 614 bp; double-stranded, linear
gaattcggccttcatggcctagggccatgttggttagaatggtgccatattttctgggatagcaccatgctggctgggatggtgccatgttggctgggatggcacctgcctcagcctcccaaatagctgggattacaggcatctgccaccatgcctggctaatcttttgcatttttagtagagaaggggtttcgtcatgttgtcaggctggtctctcactcctgaactcaggtgatccgcctgcctcggccgcccaaagtgctggaattacaggcatgagccgccacgcctggccttttacttgagttttaataggatcgctcttgctgctattgaggatagtacatatggggtaatgatgcaagcagagacctactgtagtactcttcaggagagaatggtggcttgcacaaggatggaagcaatgaaggtggtgaaaagtggtcagtttctatatttattaggaaacacctaggatgatatcttaatagaccaaaatgtgaaatgtaagaaaaatagagatgtcaagatgacacaaagatttttggctttgacaactgaaagaatagttactatcaactgtgattggtaacaatgcacatggatctctcgag

SEQ ID NO: 1400 - DNA (cDNA), 244 bp; double-stranded, linear
gaattcggccttcatggcctagttctatttaaaaaataaacaactagacaattaactagtttattaacctatcacaattgaatttttttttaattttcagtcttaacacattttttaaaatgtattaaagtaatacattgtagtagtaggattatatactccttggctgagaattccaagtactgtggttctactgtttagtggaaaactctggaagttaaaatatagaatatgaaacctcgag

SEQ ID NO: 1401 - DNA (cDNA), 325 bp; double-stranded, linear
gaattcggccttcatggcctaaaacaaacaaaaaattatctgaatgatcctgtctctaaaaagaagccacagaaatgtttaaaaacttcatcgacttagcctgagtcataacggttaagaaagcacttaaacagaagcagaggctaattcagtgtcacatgaggaagtagctgtcagatgtcacataattactttcgtaatagctcagattagaatggctaccccattctctagacaaaatcaaattgtcctattgtgactcttctaaaaatgaagatgaagagctatttaatgacacaccttggattaaaacgggaaactcgag

SEQ ID NO: 1402 - DNA (cDNA), 364 bp; double-stranded, linear
gaattcggccttcatggcctaaaagaaaagagaaagtgttattttcctgttagtgacatgtagtccctttgttctagtaggaaaaaaggtgcctagaggtagtatatagagtaaatattgttcctttagcctacttcctgcagcttccaatttatccaaggaaatgtctacaacaattttgttcaaaagtctgttctagtcaatagcaggagaagtccacgttattgggctgattttgcttacatcagcaagagaaatgtcacgtgatactcaggccgcgctttctcttccatcacaccatcttcaaggaatgtcaataaacccactttggctaggcaggattgaattctagacctgcctcgag

SEQ ID NO: 1403 - DNA (cDNA), 262 bp; double-stranded, linear
gaattcggccttcatggcctagttagggactaacatttgtatcaacagttgataaatgtctaagattgtttattatacagcagggtacaatggtagtgctaatgccaacagggcaccatggaagttagtctaaaaattatcgctaggctttatacaagcaacaacatatgctgctgctcttagaattttgggaaatgatctgcttctaatactaagcagttctttaacatttttaaatattgaattctagacctgcctcgag

SEQ ID NO: 1404 - DNA (cDNA), 396 bp; double-stranded, linear
gaattcggccttcatggcctagcaatttgcttcagtttccttatgtttgcctttctcatctgtcctcttttccattttattcctactctgtctcagtccacttacagttatatttcctatctgtgtattttataatatttgtgctttaatacttttaaaatatcctttattttactgtttcttctcttcccttgtcatattttaaagtgttttatttctcagccttctatatctttgcattaattctgttcctctacaatagagtccgttccaagctttctgtcttcctgtgtccttccacggctctggctctctctgcattatttcctatttatggaatacaaatcttttacccttgtatttttctcactcctctccacacacccccgactcgag

SEQ ID NO: 1405 - DNA (cDNA), 444 bp; double-stranded, linear
gaattcggccttcatggcctagaccaaaatgtctgcccagataaaggatacattgtgcatacatacactggggagaggcagacaaaaaaacaatgtagtttgagtgtgtgtgcgtgcttgcatgcgtgcatgcaggcatgtgcatatataatgctaaaacatgataagtactattaaaaaaacaggttagggtgattgaaactactagggtatgaataagagtgggttgcaatttaaagtagggtcattgtggttggccttattgaggtgacattggagtcaagacttggaagaagaaaggttgttggccacacagctattgagggaaaaatgttccagatagaagaaacagtcagggcaatgccttgggatggaatcatgcatagagtattcacagaatagcaaggaagctctagttctaaagtaaagtgactgagactcgag

SEQ ID NO: 1406 - DNA (cDNA), 363 bp; double-stranded, linear
gaattcggccttcatggcctacctagaaggtagtaatgataagcatttaattagaagtaggcctgaagtttgcagtgcaatgcagtaagtatttaccgagtgattcatatgagtaaggatgtgatagctgctataagagctgcaaagtttattaagatacatccctgtcctggaaacactgccagcttcgatgagaatacaacaatgttagatatattcgttttggaagatacctttcccccagttattttcatttcacagcttctccagcctccttcagcttctgttctccctctttgcttttctgtctcaattttcctgcccagccctaaattcacagagtaaatccaccagaacctcgag

SEQ ID NO: 1407 - DNA (cDNA), 229 bp; double-stranded, linear
gaattcggccttcatggcctaggcttcagggataaccacgttcaggtgggttagacacacctcctgtgggagggtgattgcaattagctatcataaggcaggagacacaacagcaacttaaattatccacaagcagaatcatgagctgtttgcaaagggagtttccatcgcaagacagtttcactgtatttaagcgagatcctgccctcgtacacgatcaccgctcgag

SEQ ID NO: 1408 - DNA (cDNA), 512 bp; double-stranded, linear
gaattcggccttcatggcctaggcttctagaacaagaatgtaggcaggctcccaaatggagaggtaaacatgaccgcgttgtttgaaactacttcattaatttgtaaatcagaaccaaaaagctctggccctcccacttctcttagctgaccctcctccccacttacggataaacagactttaacttccctaacccagaaacacttccaccaaaaatgtatggttataccttatcctaaaaaggcaccatgcaggcatttaagactgaaccagtgaactctaaatatgtagtagtagaaaatatcactaatcaaaacttccagcatcagatggtacaaaaccccaagaggactggtgacatgtaccccgggatggcaaccccagcttctggcaaccccacagcccagcgggagcttcagctctggtcaggtgcacggctgccaaagtctgcacaccttggggacaaggaaaggagacacttgcttcattgtgctattcatgacccagtcgag

SEQ ID NO: 1409 - DNA (cDNA), 262 bp; double-stranded, linear
gaattcggccttcatggcctaatggattatatttctataacagttagagtactattccatttatctctttcattttgagtaaagtttggtagtttagggaggaattgatcaatttcatctaaattgaaagattcaggtacataaagttgttgttatattacttattattcttttaatgtctgtggggtctagtgatgtctcctctttcagttctgatattggtaatttgtgtcttctctctttttgtgccagcatgctcgag

SEQ ID NO: 1410 - DNA (cDNA), 441 bp; double-stranded, linear
gaattcggccttcatggcctagggaggtggtttctctatcattgcatgaggtaagagtctggccctggatgctaaggctgcagttttctacagaaaggagtcatctctgtgaggcagcatcagcctccaagacacagtgtgctgacctggttttgtataaagatgaaaacagctgttctcaactggctgaggccggccacagagagagcggcgggctcagccttcacaggattgtccttccactaaagggtagggggttttaatcatcgcagaaaggaagtgggggtgaaggtcaggaaaaatagaagcacgaattcacccctcaggcctcagctagaggaagctaagagaagaaatgagattgcataactgttaagaaaaaggcaaagctggagagaatgcagaggattctggttcctggagagaaccttcagactcgag

SEQ ID NO: 1411 - DNA (cDNA), 479 bp; double-stranded, linear
gaattcggccttcatggcctaattcattgtctggtcctttacaaaagacatatgctggctcctgctctctgtggatgataggtctacaaagatgtgattcaactcatatatgtctccaaatttatatattaattcatatactgttttgtcttacattaatctagcattgtcttttggcttgctactgcagtaagttaccttctaattcatcattaggtcaactttatcaactcacctaagtccaaaagtaaatgtaggtttctcctgggttcttttgcctcttaagttttgccatccccaaataagcacaacagagacctgcaccaagagaccttacttttagactgtaagcaccaaagtgatttctgtagagagagtgagccaggctcagtcttatgactggcaatacaagttgagggtaggagctttggacagaacactagctatgtatagtgttgtctaggtgagtgcttctcgag

SEQ ID NO: 1412 - DNA (cDNA), 497 bp; double-stranded, linear
gaattcggccttcatggcctagccgatttataaatatgtatatataacctttccctttttgagagatctcttagtaatagtcaaagccataccctattccttagtgagaaagccagtttgaaacgaatgtagcaatagatgtaaaaacatttaaaggcgttttaatgtggctttttaatgagctggcttatgcctgtagtcccagcacattgggcagctgagctgggaggatcgcttgagcccgggagttcaagactagccagggcaacatagtgagaccccatctctatttaaaaaaaaatgtttttaaagataaggaacagacttaaagtgatgattgattgctcatagaacgttcattttgggctccagaactaggaatgatgtagaatttattgttgtgtcattgtctcattaaatgctgtagtttcctatgtccttgcctaccttctttcctcagagcctcgcatctgaccctcagagagtagcagctcgag

SEQ ID NO: 1413 - DNA (cDNA), 439 bp; double-stranded, linear
gaattcggccttcatggcctacaggaacaaaaaatgctatgctattatctcaaaaatgcatactccttcctacttaagaataataaatttatatattatgatatggtaaaattcacaactaattgtatttttccctagaatgtttaaagcattatctaataccagcttcagtgtctatattactgtaacttcatgaaagactactaacaatactggctatcatttattaatattaagtagtacttgccagatgccgttagaggtgctttaaatgcattctcatttagtcttcgtgtgtactaccgttatcttcactttttagataaggagactaaagtataactagagctaagaaacatgagaaagacgacctagctactgcctattttgtaattcccatggactaagcttggagaagtaagaactattactactcgag

SEQ ID NO: 1414 - DNA (cDNA), 243 bp; double-stranded, linear
gaattcggccttcatggcctagccacttcaagacggcaagttattttagctcctgtctaaataagttagtgggctccagtccttaaaccactattttctttattaattcctcaagtacagacttttgtatgtaaccagtctttttaaacctgtgtataatgactcattaatgagttgtaaaataaatgtagtgagttatgaccaatataaaaaaatagaaaaggccaggcacagtcgctcgag

SEQ ID NO: 1415 - DNA (cDNA), 276 bp; double-stranded, linear
gaattcggccttcatggcctagtcttccaagacaggaatcagcaacctttttttgtttttctgtatcagtaattcattctgtatattttaaaaagttttaacctcttcttcctagccctccagtatttgtttataaattaaaacgtttcccaaagtgttttctgtgaaacaatagttctaaaaggtgctctaagaaaagctaagtacatggcaaaatccaaagtatatgttttattcattacatttgatgaattttttttgttttttcctctcgag

SEQ ID NO: 1416 - DNA (cDNA), 341 bp; double-stranded, linear
gaattcggccttcatggcctagagagcaggttttagcttgcatccagctgtttcttgagtgatgtgtacagcttacccccaaagaggcaactgaatttcagctgctctaatacccacaccctcaacttaggtttagtcataataaaaaacagaatggatttgttagttccattgattgccacaaacctcaccttctgtgtggcagagatgtgctttagttcttcattggaatgttactttcagatctcacaaacctcaaacctagggcaccaccaatgacaaagagaatgctaaatagataaatcctttgccaggtcttcaagctttccactcccctcgag

SEQ ID NO: 1417 - DNA (cDNA), 455 bp; double-stranded, linear
gaattcggccaaagaggcctagccattattattaaaaagtaggattgctacccgccattactattaaaaagtaggattgctacccgccattattattaaaaagtaggattggtacccgccattattattaaaaagtaggattgctacccaacattattattaaaaagtaggattgctaccctccattattattaaaaagtaggattgctaccctccattattattaaaaagtaggattgctacctgccattattattaaaaagtaggattgctacctgccattattattaaaaagtaggattgctacctgccattattattaaaaagtaggattgctacccgccattattattaaaaagtaggattgctacccgccattattattaaaaagtaggactgctacccgccgttatttgcacagctaccttatgaaagtagtttcacgctgtctcgag

SEQ ID NO: 1418 - DNA (cDNA), 573 bp; double-stranded, linear
gaatacctagcttccatgatttatgatagatatcctttattggaccaattcgtgtctgtaaccagcctcctgtttctactgccatcccctcctcatgcacagatgcctcctcccttggctcctgctctgatccctgtacccagcttgtcccctgcaagcatgttcccctcccttgcccaggctctgacaccccacacatgtgtggatcccctcccctgtcccagctctgataccccttgcatgtgtggctgcccctcacctgggtgtcctcttccctgtcccagctctgacacccacgcatgtggggctgccccgtgcctaggtgtcccctcctctgctcaggctctgtcctcctgcggttggctttcccattctggatgcacctcacacacagccttgtcatctttggatgaatttggcctcccccatccactgctggtgcagatgcttccttacggggccttgtctgatggctttagggctgaatcatgcaggaaggaaggagaaggacaagaagaaaagggaaggctgggaagggaagcgggtggtaaaattggttcacaagccctcgag

SEQ ID NO: 1419 - DNA (cDNA), 188 bp; double-stranded, linear
gaattcggccaaagaggcctattttaaaaaaaactatttaattttttaatttatttttggttgttttttgcacaatgaagtttcagcttctcaaccttctcccctacccagggctgtggacccagactggccttgagccacagtccctctttccctcctcaccctcttccccctccgggcacctcgag

SEQ ID NO: 1420 - DNA (cDNA), 572 bp; double-stranded, linear
gaattcggccaaagaggcctacgaggaaagatctaattatcatggacctgcgacagtttcttatgtgcctgtccctgtgcacagcctttgccttgagcaaacccacagaaaagaaggaccgtgtacatcatgagcctcagctcagtgacaaggttcacaatgatgctcagagttttgattatgaccatgatgccttcttgggtgctgaagaagcaaagacctttgatcagctgacaccagaagagagcaaggaaaggcttggaaagattgtaagtaaaatagatggcgacaaggacgggtttgtcactgtggatgagctcaaagactggattaaatttgcacaaaagcgctggatttacgaggatgtagagcgacagtggaaggggcatgacctcaatgaggacggcctcgtttcctgggaggagtataaaaatgccacctacggctacgttttagatgatccagatcctgatgatggatttaactataaacagatgatggttagagatgagcggaggtttaaaatggcagacaaggatggagacctcattgccaccaaggagggtctcgag

SEQ ID NO: 1421 - DNA (cDNA), 498 bp; double-stranded, linear
gcaagacggctactgaggcaggagaatcgcttgaacccaggaagcggaggttgcaatgtgccaagatcgtgccactgcacactctagcctgggcaacagagcaagactgtgtctcaaaaaaaaaaaatcttngacnaaacatagttgttnacatacttctttaatcccagagttagttttaaaaannacatgattgctgtttttgcatattatctcagcggtctaaaattaacctagccatgtgcaggaatgggtaaagtccccttaaacaaaaatggggttagttangttagttcttttgccatttcactggtcatatacctgaagcgcttagcctgacacaattgaacgccagacggaagccgngatcagcggtcctgacgggggtcagagtcagaccaggggtcttttacccaagtggggaagattgggaaaggcctaggatcagagagggaaatgggtccctggttgcccatggacctaatggggtctctcgag

SEQ ID NO: 1422 - DNA (cDNA), 827 bp; double-stranded, linear
gaattcgcggccgcgtcgacgaggaaaccagccaaggactaactacgaccatgagattggcagtgatttgcttttgcctgtttggcattgcctcctccctcccggtgaaagtgactgattctggcagctcagaggagaagctttacagcctgcacccagatcctatagccacatggctggtgcctgacccatctcagaagcagaatctccttgcgccacagaatgctgtgtcctctgaagaaaaggatgactttaagcaagaaactcttccaagcaattccaatgaaagccatgaccacatggacgacgatgatgacgatgatgatgacgatggagaccatgcagagagcgaggattctgtggactcggatgaatctgacgaatctcaccattcggatgagtctgatgagaccgtcactgctagtacacaagcagacactttcactccaatcgtccctacagtcgatgtccccaacggccgaggtgatagcttggcttatggactgaggtcaaagtctaggagtttccaggtttctgatgaacagtatcctgatgccacagatgaggacctcacctctcacatgaagagcggtgagtctaaggagtccctcgatgtcatccctgttgcccagcttctgagcatgccctctgatcaggacaacaacggaaagggcagccatgagtcaagtcagctggatgaaccaagtctggaaacacacagacttgagcattccaaagagagccaggagagtgccgatcagtcggatgtgatcgatagtcaagcaagttccaaagccagcctggaacatcagagccacggcctcgag

SEQ ID NO: 1423 - DNA (cDNA), 348 bp; double-stranded, linear
gaattcgcggccgcgtcgacgggagaggaagggttgggcaggatggaatattaaattgtaacatgataaacatgcaagactgttatccaatctagataatttatatacattttgatgacttaggaaaacaaagcaatcatttgtgacaagcctaaaaagcttgacatatttaacatacttaggaactttttttgtgcggtgggaattctctaattgtatcatgtgggccttttgaaagtaacaaacagaaggccagtctgttgcaagtttgctgctgaacatcacattccaccctaagaaaacacaaggtggattgcatcgagggtggataccttaccttagcacaga

SEQ ID NO: 1424 - DNA (cDNA), 152 bp; double-stranded, linear
gaattcgcggccgcgtcgacttggagaatgtggcctctgatcactaaccagggttttctctttacactggcttgtttacttatttcttcaccaaagccagggaacgtccctttagctactgcagcatttctaacagatgcgacaaatcacag

SEQ ID NO: 1425 - DNA (cDNA), 206 bp; double-stranded, linear
gaattcgcggccgcgtcgacctaaaccgtcgattgaattagacctgcctcgagatgcgccactttctgctcacccaccttagagcctttgcatatgcagttgcttcctcagagtattgccatccccagcacgacccccagctcattcttcaggccactaacgtaaatgttactttctcaaaaacaccctctccatcccggcaccca

SEQ ID NO: 1426 - DNA (cDNA), 353 bp; double-stranded, linear
gaattcgcggccgcgtcgacgtgggtacttcatcctcctcatcactggttggcactgagagcttcttaagacgctccatgagctctttctcttctccatcatcatccacatccttcttccgcctgccttttcgggtatctcgcttttttttttgctgctgttgctgttgctgctgctgctgctccttctccttgagcactttctcttcttccccagcctgtttatcttctactgccagctcttcaaagaacgtttttttgatcttctngtccttcttccctttcttcaccactttgtctgatgggctcgtgctctctccgtccccgatccactcgggctccggcggactcgag

SEQ ID NO: 1427 - DNA (cDNA), 343 bp; double-stranded, linear
gaattcgcggccgcgtcgacagatatttggttatcttgactttttaaaataacatatttctacaggattttgagtctgagaagagaaaggtaatatgcaagacacttcgatttgttgcacattattatggagcatcattaatggtttgtacatttcttgtcctttgggcttgaatggacagtaccaaatttggggaaatcagcaacttgatgcacagctacgaggaataaatgcttttgctaatgcacatggtcccgttgctttcccactgctgaagacctctccttacagagtgtttgataatgcatctgttgaacatgcactgctagatggtcctctcgag

SEQ ID NO: 1428 - DNA (cDNA), 542 bp; double-stranded, linear
gaattcgcggccgcgtcgacgaggggaagatgtcacgcaagatagaaggctttttgttattacttctctttggctatgaagccacattgggattatcgtctaccgaggatgaaggcgaggacccctggtaccaaaaagcatgcaagtgcgattgccaaggaggacccaatgctctgtggtctgcaggtgccacctccttggactgtataccagaatgcccatatcacaagcctctgggtttcgagtcaggggaggtcacaccggaccagatcacctgctctaacccggagcagtatgtgggctggtattcttcgtggactgcaaacaaggcccggctcaacagtcaaggctttgggtgtgcctggctctccaagttccaggacagtagccagtggttacagatagatctgaaggagatcaaagtgatttcagggatcctcacccaggggcgctgtgacatcgatgagtggatgaccaagtacagcgtgcagtacaggaccgatgagcgcctgaactggatttactacaaggacactctcgag

SEQ ID NO: 1429 - DNA (cDNA), 465 bp; double-stranded, linear
gaattcgcggccgcgtcgacttaagagtctgcttcggagaccgtaaggatattgatgaccatgagatccctgctcagaacccccttcctgtgtggcctgctctgggccttttgtgccccaggcgccagggctgaggagcctgcagccagcttctcccaacccggcagcatgggcctggataagaacacagtgcacgaccaagagcatatcatggagcatctagaaggtgtcatcaacaaaccagaggcggagatgtcgccacaagaattgcagctccattacttcaaaatgcatgattatgatggcaataatttgcttgatggcttagaactctccacagccatcactcatgtccataaggaggaagggagtgaacaggcaccactaatgagtgaagatgaactgattaacataatagatggtgttttgagagatgatgacaagaacaatgatggcatactcgag

SEQ ID NO: 1430 - DNA (cDNA), 373 bp; double-stranded, linear
gaattcgcggccgcgtcgacgctgttcatgaggagacttaaccacaattcaaagtgtagcagttgtgtattttagcattataatatttgattgaggccctgaggtgttaatatctcaatctcagagttagatgttcatgtcctttttgaattttttaaacatttttcataattttttttttaagttagggagcacattgagtgaagttctctgtgtagaacaataccttctgctctgcttctcccagctttcactgagggctggaaaaggacaggcctgtccagctgtactgtcccactgtgtatggggaagctcaggctctggtggaagcagggggcatggatgtcaaacaactgatgtgcaaacactcgag

SEQ ID NO: 1431 - DNA (cDNA), 632 bp; double-stranded, linear
gaattcggccttcatggcctactactgatgagaacattatctgcatatgccaaaaaattttaagcaaatgaaagctaccaatttaaagttacggaatctaccattttaaagttaattgcttgtcaagctataaccacaaaaataatgaattgatgagaaatacaatgaagaggcaatgtccatctcaaaatactgcttttacaaaagcagaataaaagcgaaaagaaatgaaaatgttacactacattaatcctggaataaaagaagccgaaataaatgagagatgagttgggatcaagtggattgaggaggctgtgctgtgtgccaatgtttcgtttgcctcagacaggtatctcttcgttatcagaagagttgcttcatttcatctgggagcagaaaacagcaggcagctgttaacagataagtttaacttgcatctgcagtattgcatgttagggataagtgcttatttttaagagctgtggagttcttaaatatcaaccatggcactttctcctgaccccttccctaggggatttcaggattgagaaatttttccatcgagcctttttaaaattgtaggacttgttcctgtgggcttcagtgatgggatagtacacttttcactcgag

SEQ ID NO: 1432 - DNA (cDNA), 298 bp; double-stranded, linear
gaattcggccttcatggcctactaatttccaagagctaaactttataccgcctgcaatatttccatttactaccagtttttttctgacctagtcagatataagaagcccccttactggatacaagacagttaattatcagatccagtctgatcctagatccagtctgatcctagacccagtccagtttctgttgtgacttccaaacccagtttggatcagaaatttgctcaaagaaactaggagagctcaaaacacaaatatgtggagcttctgaatctgagagagaacgaactcgag

SEQ ID NO: 1433 - DNA (cDNA), 335 bp; double-stranded, linear
gcgtggtttcaccttgttggccaggctagtcttgaactcctgacctcaggtgatccacccacctcggccttccaaagtgctgggattacaggcatgagccaccgcatctgactggtgcactttactttgacctgtcataaatcccttggtttgttattactagtttttactttagacagcaattatctttcaaggaaaaatttaaaaggaaaaaatgtcttatatttaccctcatgtttaccattcccagtgctctttatttctttatgtcaatccggatttcaatttgttatcatactgtttctgcctgaataacagtttaacagcaactcgag

SEQ ID NO: 1434 - DNA (cDNA), 316 bp; double-stranded, linear
gaattcggccttcatggcctaatgctctgtgtcactgtctcccggtgctcagcacagacaagttcaagacagatttttatgatcaatgcaacgacgtggggctcatggcctacctcggcaccatcaccaaaacgtgcaacaccatgaaccagtttgtgaacaagttcaatgtcctctacgaccgacaaggcatcggcaggagaatgcgcgggctctttttctgatgagggtacttgaagggctgatggacaggggtcaggcaactatcccaaaggggagggcactacacttccttgagagaaaccactgtctcgag

SEQ ID NO: 1435 - DNA (cDNA), 383 bp; double-stranded, linear
gaattctagacctcccaccctgtagaacattctcctcacttaggagatagtcatattttcaggctgcctttgaaactgtgggtacacaaacagcagagcgatctatttcagcagttgaagttgtatttgagccattatttcttccactctctttttggttgagtttctaggaaggaaagggctgaactccatgactgctcatattacagtgctaagtcctcacagccatccactgtttatacacaagaagaaactaggcccaccaagagtaagcgcctgcctgaggtccgtgagtgagtaagggccaaaggtgaggttgggatctggccctttctcttttctggccaccacagggcactacctcccatacccacacactcgag

SEQ ID NO: 1436 - DNA (cDNA), 303 bp; double-stranded, linear
ggagaactgctaaggtccacaacgtcgacaattgaaagctttgctgcacaagaaaaacaaatggaagtttgtgaagtatgtggagcctttttaatagtaggagatgcccagtcccgggtagatgaccatttgatgggaaaacaacacatgggctatgccaaaattaaagctactgtagaagaattaaaagaaaagttaaggaaaagaaccgaagaacctgatcgtgatgagcgtctaaaaaaggagaagcaagaaagagaagaaagagaaaaagaacgggagagagaaaggaaagaactcgag

SEQ ID NO: 1437 - DNA (cDNA), 228 bp; double-stranded, linear
gaattcggccttcatggcctagacttttacacatttttattagctacctggaattatttttgtaacacgttaagtgtaaataaacaaataatgctttgctttttgttttctggaattattgttgtatttctttgccaaatgcatatatcttcaggtcttttttttataaccatatgcataccaaggcaccattccattgactttccaacttctgtcccaaccctcgag

SEQ ID NO: 1438 - DNA (cDNA), 498 bp; double-stranded, linear
gtgaattccagtccccacccagaaacccgcagcatgattgtctgcctccttttcatgatgattttattggcaaaggaagttcaactggtagaccaaacagattcacctttacttagtctccttggacagacaagctcactttcatggcatcttgtggatattgtgtcgtaccagagtgtgctaagttatttcagcagccattacccgccgtccatcatcctggcaaaagaatcttatgctgaattaatcatgaagctcctaaaagtgtctgcgggcctttctattcctactgacagccagaagcatcttgatgcagttccaaaatgccaagcttttactcatcagatggttcaattcctcagcaccctggaacaaaatggaaaaatcaccttagcagtcctagaacaggaaatgtctaagctcttagacgatatcattgtctttaacccgcccgacatggacagccagacccgccacatggccctcagcggtctcgag

SEQ ID NO: 1439 - DNA (cDNA), 314 bp; double-stranded, linear
gaattcggccttcatggcctagcagggagaggggttctgtgctcctgagattagttcagatggtctaaccattgttctatatgtgcattttagttaatattgtgtattaaaggataagtcttaatgctcaaagtatgttaaaaatagatgtagtaaatcagtccctttgtgaatgtccttttgttagtttttaggaaggcctgtcctctgggagtgacctttattagtccaccccttggagctagacatcctgtacttagtcacggggatggtggaagagggagaagaggaagggtgaagggaagtggctcgag

SEQ ID NO: 1440 - DNA (cDNA), 424 bp; double-stranded, linear
ccagccgtctgcagctccggccgccacttgcgcctctccagcctccgcaggcccaaccgccgccagcaccatggccagcaccatttccgcctacaaggagaagatgaaggagctgtcggtgctgtcgctcatctgctcctgcttctacacacagccgcaccccaataccgtctaccagtacggggacatggaggtgaagcagctggacaagcgggcctcaggccagagcttcgaggtcatcctcaagtccccttctgacctgtccccagagagccctatgctctcctccccacccaagaagaaggacacctccctggaggagctgcaaaagcggctggaggcagccgaggagcggaggaagacgcaggaggcgcaggtgctgaagcagctggcggagcggcgcgagcacgagcgcgggctcgag

SEQ ID NO: 1441 - DNA (cDNA), 346 bp; double-stranded, linear
gaattcggccttcatggcctataggccatgaaggccggccttcatggcctagtcaggcttaagtttaataaatagcaaattgcatacagatatttacaatgatcgaaagacaaacagaggtcctatccgtgcagtcccaacaataaagacaggcattggcataaagtgtttataaattcttgggtacagctgttctgaaagtaaagttcactttcaatcctaaaaaaagtccgctattcctccctggctgctctggactgtcctcatcctctttagctgctgttgcgccttccgccaccgacgagctaaactcaggctgcaacaacagcagcggcagcatctcgag

SEQ ID NO: 1442 - DNA (cDNA), 591 bp; double-stranded, linear
gaattcggccttcatggcctaggcttccctgttccctcagccccagtcgagaggaaagagaatcgggccactgccagaaagagagtcaagcaaacctggaagggcaaatctgagagtgggaaggccaaaggccgaggcccagatttagtattcactagcagcgccttcgggtagcaggatgattccttttcctgcctgtctgctgctggctctcttccctaaggtacaggttggcaggaccacctccgcctacttctccaccatccctagcatgccagcccgttcccagatcaacctgccagtggagtcaggcagtgcactcctggagccaagagggaagggcagggtagagagggtatgtccagtagcctggagctccatggtggcttcatgcctcccttctcccagctcaggtggccctgagggctccctcggaacagtgcctcaaatcctgacccaagggccagcatggggaagagatggttgcaggcaaaatgcactttatagagattttctattgctgggaaggtgtgtttctcccacaatttgtttgtgaatattcacttgttttataaatgtctgacctgtccg

SEQ ID NO: 1443 - DNA (cDNA), 526 bp; double-stranded, linear
gaattcggccttcatggcctagattgaattacctgcctcgagctcctgtccttaggtgatctgcccgccttggcctcccaaagtgctgggattataggagtgagccacctggcccagctagcttttaaagttctgccagcatagccccgggatggggtgggggtagacagggccttaggactttcatttttaaaatgctcactccacagtgaagaaacaggtgatgactatcctgaatatttgggaagctgtgtcctagaatttttggcctcagttccagaacccacagcttctttacaacatgcttcaagcctgggactgagctgccagtaaataaacccctagtaaccttaatatgggttaataagattaggtgcccgctctgcacgctcccctgcccctcctcgtccgggcacctgttatgctaggccagcatgtttgcagcttagccagggaaaatcgtggaccaagacagggcttttcatccacgactggctaaaaagatggctctcaataatatctcgag

SEQ ID NO: 1444 - DNA (cDNA), 279 bp; double-stranded, linear
gattgaattctagacctacctctctttttttgtggtctctccttcattctctgttcatttctccgtgagattttctgattagtagttaccttcagcatgccagttgacttgcaaacctacaatccaacctttcttctactttgtcatctgacaacagcctggtttgtagctgattccaggacttcttcacttgggtggccactctcattaccacagagttcactagtcatggtgaacacaccagtcttttacacctccctcactcccaaaccactcgag

SEQ ID NO: 1445 - DNA (cDNA), 644 bp; double-stranded, linear
gaattcggtcttcatggcctaggggaagaaaggcacctttctcacagggtggtgagagagaggaagggggacggggaaagccctttataaaagcatcagatcggctgggcacagtggctcacgcgtgtaatcccagcactttgggaggccgaggcgggtggatcgcggggtcgggggtttgaggccggcctggccaatatggtgagaccccgtctctgctgaagatacaaaaattggctgggcatggtggcgggcacctgtggtcccggctgcttgggaggctgaggcgggagaatcgcttgagcccgggaggcagaggttgcagtgagctgagatcgcgctactgcactccagcctgggcaacagagcgagactccatctcaaaaataaaagaaaggcataaatattacattaccctctgaatactgtggttgtatacttgagtttttatgtgtgtatatatatgtgtataggagagtaaaaataaaatgaaattaggattttgcaagttataatcatataaaattgattaccctaaatatatcattaggatattatgttatttacatctcttatgctaattctaattttcttttattgtagtatagtagaattgagatttgnnaatggaattggtcctcgag

SEQ ID NO: 1446 - DNA (cDNA), 756 bp; double-stranded, linear
gaattcggccttcatggcctacctcacccggcccggacacggacaggattgacagattgatagctctttctcgattccgtgggtggtggtgcatggccgttcttagttggtggagcgatttgtctggttaattccgataacgaacgagactctggcatgctaactagttacgcgacccccgagcggtcggcgtcccccaacttcttagagggacaagtggcgttcagccacccgagattgagcaataacaggtctgtgatgcccttagatgtccggggctgcacgcgcgctacactgactggctcagcgtgtgcctaccctacgccggcaggcgcgggtaacccgttgaaccccattcgtgatggggatcggggactgcaattattccccatgaacgaggaattcccagtaagtgcgggtcataagcttgcgttgattaagtccctgccctttgtacacaccaacccgtcactgacttttaccgcagctggaactgtgctccagggcctttccatcttttcccccacactccctttgaccctgtgttgccctcagaggccaaattcttgggctcagggactggctttcggcctattggtggtggagctggggttctggcaaggaatttcaggcagcgcttggaggcaatgttccccgagagcagttcacggtggtgatgttgacttatgagcgggaggaagtgcttatgaactctttagagaggctgaatggcctcccttacctggaactctcgag

SEQ ID NO: 1447 - DNA (cDNA), 359 bp; double-stranded, linear
gaattcggccttcatggcctacctgcctcgaggtcactgggatcatctgaacagaagtgcacaggctacttgtacagagaaaaaattaatactcaaaggaaatcttcattttttagattgactttgggaatttgaattttcatcagtgcaaatataaatttctctatcctgctctgaggctaattggtaccatattttccctttgtgtcttgtgactctgccacatcccatctcatcctggcctctgagtcaagaacccagtgaactgactttctagttctagaagttccgctgcaaggccaggaaagcttgagaaaggtattgtggaagaagcaaaggtagacccccattcactcgag

SEQ ID NO: 1448 - DNA (cDNA), 146 bp; double-stranded, linear
gaattcggccttcatggcctagggaaaataagttaattctaaatcaaatctaaatattatacctcatgctatggttttattttatttcagtgctgccgttacttttcctccccaaagcaatgtgttttccagccacaaccctcgag

SEQ ID NO: 1449 - DNA (cDNA), 308 bp; double-stranded, linear
gaattcggccttcatggcctacttttcaaaagcagctttgctctactgatttgggtaaaagcttagttgcagttggnttgggaggaaatgggagcagaaaatttgagagagtgagtgtagacaactctttcaaggaatttcgctataaatgggagtagagatctgaagactgaataattagcaaactgaaaagtgggaagacgtaattctcttattatttcatttttcttagtgaaataagaggtgaagttctctgagtaataggagggtcaaacaggngttagaagttcacaaagaaaggtctcgag

SEQ ID NO: 1450 - DNA (cDNA), 545 bp; double-stranded, linear
gaattcggccaaagaggcctagcatgttgtggctgttccaatcgctcctgtttgtcttctgctttggcccagggaatgtagtttcacaaagcagcttaaccccattgatggtgaacgggattctgggggagtcagtaactcttcccctggagtttcctgcaggagagaaggtcaacttcatcacttggcttttcaatgaaacatctcttgccttcatagtaccccatgaaaccaaaagtccagaaatccacgtgactaatccgaaacagggaaagcgactgaacttcacccagtcctactccctgcaactcagcaacctgaagatggaagacacaggctcttacagagcccagatatccacaaagacctctgcaaagctgtccagttacactctgaggatattaagacaactgaggaacatacaagttaccaatcacagtcagctatttcagaatatgacctgtgagctccatctgacttgctctgtggaggatgcagatgacaatgtctcattcagatgggaggccttgggaaacacactcgag

SEQ ID NO: 1451 - DNA (cDNA), 331 bp; double-stranded, linear
gaattcggccaaagaggcctacagtaagcagatgaacttgcttgctgttctcgaagtgaggactgaagggaacgaaaactggggtgggtttttgcgcttcaaaaaggggaagcgatgtagcctcgtttttggactgataataatgaccttggtaatggcttcttacatcctttctggggcccaccaagagcttctgatctcatcacctttccattacggaggcttccccagcaaccccagcttgatggacagcgaaaacccaagtgacacaaaggagcatcaccaccaatcctctgtaaataatatttcatacatgaagggaaccctcgag

SEQ ID NO: 1452 - DNA (cDNA), 263 bp; double-stranded, linear
gaattcggccaaagagggaagggaaaatttcaagtcagatagaattctatatataccatttctttggaaccttcagccctcaagattccaacatcatgacctcagtttcaacacagttgtccttagtcctcatgtcactgcttttggtgctgcctgttgtggaagcagtagaagcgtatatgcacgaaaaagaaatggacagatgtgactttgaaaggcctactgagtcaaacctcaccctgaaaacctttgcagcactcgag

SEQ ID NO: 1453 - DNA (cDNA), 558 bp; double-stranded, linear
gaattcggccaaagaggcctaattttaaagccctgctaacttcaatgtctaggtcacccatttgtttatttttatggtcttttttcatcctgatttttggtcatttggtcccgtcttatggcatacctggtaatattttattgaatccttagtactgtacatgaaaaattgtagaggccccagtagttttctttctctgaagaggagtcaccctttccttcactagacagttatgttgggggttatataccttactccaatcaaagattgagctgagtcagaactctaagggagttaagtttttgtgtcctctggggaccaggggttccaactaagactgtgatattcaccaggatccaatttcccgatgcctcttgaactcttattcttatctttttaacacatcaaggcagctggtttgcatttttctttctgttcagctttttagcttcatcctttgcagctttagaaattgacagttgtcttacagggaaaagtagctgtgtaacaagctcatgtctctgcctctcttccactgatatcttagccccgcaggag

SEQ ID NO: 1454 - DNA (cDNA), 328 bp; double-stranded, linear
gaattcggccaaagaggcctacctaaaccgtcgattgaattctagaaatacaatgattttaaaaaagatttccaaaggctttttctttttttcttttttctngagacagggtctcactctgtcgcccaggctggagtgcagtgacacaatctcggctcacggcaagctccgcactgccccctcaggttcacgccattcctccgcctcagcctcccgagcagccgggaccacaggcacgcgccaccacgcccagccaacttttacatttttagtagagacggggcttcaccatgttggccaggatggtctcggtctcttctgcctcgag

SEQ ID NO: 1455 - DNA (cDNA), 481 bp; double-stranded, linear
gaattcggccaaagaggcctacttgatgtctgtgacccacacntattcgcacactccctccccttttgaaaatccctaataaaaacttgctggtttttgcggctagtggggcatcatggaacctactgacatgtgatgtctcccccggatgcccggctttaaaatttctctcttttgtactctgtcccttaatttctcaagctggccgatgcttagggaaaatagaaaagaacctaggtgaatattggggcaggctccctgatgaaatgatatatattcttaaaataaacttttcatctttgcatatacgtttatatgccgagttttctccaaccttgtcttacagcactttgtatactacattctagccatactaaactcttgcagttcctgagacatgtgctgtatcctatttcttctggtccttttctcattgattaactacctggagcatacttttaattcagtgtcagcgctcgag

SEQ ID NO: 1456 - DNA (cDNA), 393 bp; double-stranded, linear
gaattcggccaaagaggcctacttcaccttcaagtcccctttctcaagaatcctctgttctttgccctctaaagtcttggtacatctaggacccaggcatcttgctttccagccacaaagagacagatgaagatgcagaaaggaaatgttctccttatgtttggtctactattgcatttagaagctgcaacaaattccaatgagactagcacctctgccaacactggatccagtgtgatctccagtggagccagcacagccaccaactctgggtccagtgtgacctccagtggggtcagcacagccaccatctcagggtccagcgtgacctccaatggggtcagcatagtcaccaactctgagttccatacaacctccagtgggatcagcacg

SEQ ID NO: 1457 - DNA (cDNA), 266 bp; double-stranded, linear
gaattcggccaaagaggcctagtgtgtgtgtgtgtgtgtgtgtgtgtgttttatctccttcaactctgaccacctggaagtcagcctaatctctgccctcgtgttgatctttaattcaacatttaattacctatcttggtatccatatgaatttgattgtttttttggctttttttgaactcataaaaggtatccaagttcctggagggcatagtgcccatctcctcccatccaccagtggacattcttttccaaaagacacatgg

SEQ ID NO: 1458 - DNA (cDNA), 292 bp; double-stranded, linear
gaattcggccaaagaggcctaggttgtagttactttcagagtagatacagggttttagatcattacagtttaagttttctgaccaattaaaaaaacatagagaacaaaagcatatttgaccaagcaacaagcttataattaatttttattagttgattgattaatgatgtattgccttttgcccatatataccctgtgtatctatacttggaagtgtttaaggttgccattggttgaaaacataagtgtctctggccatcaaagtgatcttgtttacagcagtgctctcgag

SEQ ID NO: 1459 - DNA (cDNA), 289 bp; double-stranded, linear
gaattcggccaaagaggcctagttttatgagagggtttccattaagaagttaattgaaattctttatttatgtaaaatgaaatttccaattaaattatttcacacagcattttttccccttaatttcattagtttttttatttcttggccgacccaggccaggagcttagggaaaatgatgaggcctcttttacgctgtagtcctgcaaatgctgtgttttattccccctcccctgctcagcactcacccacgactgacacatggggtacacacacacacatactcgag

SEQ ID NO: 1460 - DNA (cDNA), 330 bp; double-stranded, linear
gaattcggccaaagaggcctacacctgcgttggaacatctgatccagtgatagcacgtcactaggtgccttaattaataaagccaaaatatctttccactagcaaactaatcgtattcacttttactctcccatttttaattaatctttcctatttcatttcaccctctcatctctttcctctattggattatctcaggtatctaatccaattcactactgtttaatgaatgtaattgcaaccagtctgcaattcctaaggttttgtttctttgcttttttcttttgtagtccatctctttgctacactcaagcaggtctagaattcgag

SEQ ID NO: 1461 - DNA (cDNA), 383 bp; double-stranded, linear
gaattcggccaaagaggcctagggacagtgattataggactccacacatgcaactgaatctagcattactgactttaaattttttgagcctatctaaaggccagatgctatcagcagctgaacggcatctaccaaaaccagctgcaaagatagaagcggaacaactggtttggtggagagattcgataacaacgagttgggaaataggtaaaataataacatggggtagaggttatgcttgtgtttctccaggccaaaaccagcagctgatttggataccatcaagatacctgaaaacttatcatcagccagatgccaaggaagagattttgggaggaacccgaggaccccatgttattattttacctattccccaactcgag

SEQ ID NO: 1462 - DNA (cDNA), 375 bp; double-stranded, linear
gaattcggccaaagaggcctacgatgacgtcaccgtcaccaccggcgtgaagcgagacagtggtgagggcttctggactggatggaggacctgaagacatgaggtggaggcacaggtagaagagaagattctcaccatcgctgattcacacaaaagcatttctccaagtggttgcagatgacatgatttcccaaagtgttagagctgaagtgtgtttccttgtgtatatatactgtggttcctttatcccttcatctgtggatagacaggtgcaaccgtgtggttccccacgatatgatttcattgtggttttctgtctgaagagtatcccagtatgtacctgtggagcagcttctttatcccttcttactcgag

SEQ ID NO: 1463 - DNA (cDNA), 174 bp; double-stranded, linear
gaatttgggcggagacacaaattcaaatcatatcaacctggtaaagaatttggattttattttgagtgtgttagtgagtattgcatggctttgagcagagaaaggatgatttatatgtttaaaagagtgctttgcctcttatatgtggaagagattgtaggaggaggactcgag

SEQ ID NO: 1464 - DNA (cDNA), 122 bp; double-stranded, linear
gaattcggccaaagaggcctagttgcggtttaaatttccaaatgtatggcatttgcttgttttttaagttgatttctagttttatcacattgtggtcagagaatgctgagaaagagctcgag

SEQ ID NO: 1465 - DNA (cDNA), 315 bp; double-stranded, linear
gaattcggccaaagaggcctacttgagcttttttcatgtgtatatatttatgcttcttttctaaaaaaaattgagatggaaattcacataacagaattaactaaagcatacatttcattggtatttactacattcacaatgttgtgcaatcattacctctctccagttctaaacatttcatcaccccaaaaggaacccctaagcggtcactccccactccactgtctcccacagcccctggcaaccagcagtctgctttgtgtctcaatggatttacctactcttgatagctctacaaatggaacaatactcgag

SEQ ID NO: 1466 - DNA (cDNA), 175 bp; double-stranded, linear
gaattcggccaaagaggcctaggtaagagaaacgaccaattctaccagttattctacaatgtgggttttcactgctctgttcacatgccttattcagacttcttgtggtggtcaattgctagatggtctgttggaattatctgctgtcatacatccaaaaaggtctcacagagag

SEQ ID NO: 1467 - DNA (cDNA), 350 bp; double-stranded, linear
gaattcggccaaagaggcctagaaggacacctccatccattccacgcagttgctcaaagcagaaattttcagtgcaagtcttgatgctgcgccgtcccccactccctacatcagaacgcatccctcatctggactccagcggtggcttcttgatgctgcgcggtcccccactccctacatcagaatgcatcccgcatccagactccagcggtggtgctctacctgcacgctgttgccaagtccaagctaccatactcctgcctgagctatgacaacagcctcctcactgatctcccctttcttccctttgcctcctccagctcatttttcacagtgtagaatgactcgag

SEQ ID NO: 1468 - DNA (cDNA), 419 bp; double-stranded, linear
gaattcggccaaagaggcctactatactaaaattctgtgcaaaaagatgcttgaaattattgtagagactgaatctttgctgcttgttataaatattgcagggcataaaccttccattcataggttcatcagcttttatgattgggagtgacagggaggcagcattgcagtccttagtcctaggtgtggtctagaatttaccctgtatttaagtcactttggaatagaagttttttttctcggacaggatacactatatatttttaaatctcctcccatagtcgtagtgcagagatataaatagaagtacaggtaagagatgtcttctgcctttcaaacccttcctaagtttgtgtgctgctttaactttattcacatagagcagtctgttttattactcaggatatgggccactcgag

SEQ ID NO: 1469 - DNA (cDNA), 612 bp; double-stranded, linear
gaattcggccaaagagcgatggggacaaaggcgcaagtcgagaggaaactgttgtgcctcttcatattggcgatcctgttgtgctccctggcattgggcagtgttacagtgcactcttctgaacctgaagtcagaattcctgagaataatcctgtgaagttgtcctgtgcctactcgggcttttcttctccccgtgtggagtggaagtttgaccaaggagacaccaccagactcgtttgctataataacaagatcacagcttcctatgaggaccgggtgaccttcttgccaactggtatcaccttcaagtccgtgacacgggaagacactgggacatacacttgtatggtctctgaggaaggcggcaacagctatggggaggtcaaggtcaagctcatcgtgcttgtgcctccatccaagcctacagttaacatcccctcctctgccaccattgggaaccgggcagtgctgacatgctcagaacaagatggttccccaccttctgaatacacctggttcaaagatgggatagtgatgcctacgaatcccaaaagcacccgtgccttcagcaactcttcctatgtcctgaatcccacaacaggcgcactcgag

SEQ ID NO: 1470 - DNA (cDNA), 220 bp; double-stranded, linear
gaaaagccaagactttaactttcattacatatctaatagttgatatcaccagttaccattttgaattttgtatagtactaggttagaacattgcttaatccttttaaaaaaaatgcatttacgtagaactcgagcaggatgtttggccccgatgttttttcttcatactcttctgtcgcctcctcccatttctgcacagttctcacccactactctcgag

SEQ ID NO: 1471 - DNA (cDNA), 349 bp; double-stranded, linear
gaattcggccaaagaggcctagggcatcatgcagacacatctgttaaagcaggaaaaaaaaaaccatgtggaagattaagctaggcagagtgcctgaaaagccctctgcaataagttgagctggaaaaacctccatatctaaagatgctttaatcatctcaagaacaccaacaacattttctattataatataactatgatagatgtgaatctacctcttggattaaggcaataattttatagctatcaaattttcacagacaccattttcactactctgagttgcatctctaacaagcttctttagcctctgcctacagatttcagtgacaaagccattcagctcgag

SEQ ID NO: 1472 - DNA (cDNA), 310 bp; double-stranded, linear
gaattcggccaaagaggcctacaacaaaccattcttcagcacctttgcaaaaacatctatgtttgttttgtaccttttgggctttattatttggaagccatggagacaacagtgtacaagaggacttcgcggaaagcatgctgctttttttgcagatgctgaaggttactttgctgcttgcacaacagatacaactatgaatagttctttgagtgaacctctgtatgtgcctgtgaaattccatgatcttccaagtgaaaaacctgagagcacaaacattgatactgaaaaaacccccgcggtactcgag

SEQ ID NO: 1473 - DNA (cDNA), 297 bp; double-stranded, linear
gaattcggccttcatggcctacaactttaagattagctactttgaataatctcagtaggttctggggcacaggagctgcccctcttggtctgagatttggccatggggtgattaggacaggtatagtggcacagagtgtaaaaaccccataatggtgtggattctggattgcttagtttgcatttgacaagtgcatgcctgggaggaggactcctcttagtaaagaggatgggaggcaagaagagaggccagaggccaagacaaggtaacttaggcatagcatcaggttgtctcgag

SEQ ID NO: 1474 - DNA (cDNA), 510 bp; double-stranded, linear
gaattcggccttcatggcctaaaaaagtatgcaacactcagtttatttaatacttacaaggggaaatcattagaaacacagaaaaccacagttgcagctcgacatggattacagagtcttggaaaagtcggtatttcacggcgtatgcctccacctgctaacctcccaagtcttaaagcagaaaacaaaggcaatgatcctaatgtaaacattgtacctaaagatggcacagggtgggcatcaaaacaagagtaacatgaagaagaaaaaacaccagaagtgccaccagcacagccaaaacctggggttgcagctcccccagaagtagcacctgctcccaaatcatgggccagtaacaagcaaggtgggcaaggagatggaatccaagtgaatagtcagtttcagcaagaatttcccagcctgcaggcagctggggatcaggaaaaaaaagaaaaggaaacaaatgatgacaactatggacctggacccagtttacgtccaccactcgag

SEQ ID NO: 1475 - DNA (cDNA), 400 bp; double-stranded, linear
gaattcggccttcatggcctaatccattcatttgatggacattttctaagtacctgtgagccaggtgctgccatttcaaagtctcttcttaccacgctcctcagtggctagacattttcacgtggccagaaagtcccgactcttgctgggcgtccctggacaagttgccttcctcctctgagcttggcgctccccatctgtatagtggagacccttggcccccctctgtacggaagggccgatgcgaagctgcagttaaaaaaggctcacatgctcctagccttgtgcagtcaggaggggagaccaggacagttggaaattatgattgcaaatggctttgcattttagatcattcgtgtgtgtggatcagagaaacgcacaagttccctggcatctcgag

SEQ ID NO: 1476 - DNA (cDNA), 465 bp; double-stranded, linear
gaattcggccttcatggcctaccacattttgtcagcagagagccttttaaacttggattccaacttcctgttgtctaaacggaaccctccgaacgtaggacttataggggaagctgctgtgcatgtcaaaaaaactactaatcagaatgagctttgtcatccagagccagaactgctgcagaaatttttataattttgcaacttctttttttacaaggaacttttgtgctactacacatcaggacttttgaagcatccaataaatccatttaataagtatgagcatgtgtctgagtggacaagaaagtgaaaccatccatgctacattggataatttttcctcccccagactggacagggaatctcagctttcaaaacagagtaacctggctccacttacaaagctgcacaggcattaaagatcgtgctgcctttgttaggcagatttggaggggagagctcgag

SEQ ID NO: 1477 - DNA (cDNA), 377 bp; double-stranded, linear
gaattcggccaaagaggcctacatgtagctatcctaagacgtattttattttgagccactttctcagagggaattgggtgggtgtggtcgtaagaacacctagaaaataggggtgaaacctttatggggccaggggagccatggcagagggtggagtgggggatagaagccttcagactcctccgccccagccactctgcacctggggcctttcagctgttaaaatgaaaagccaattatcttctgtaaatgagggaaaaaaagaaggaataaaagtgtctattatgtatgctgatatgcataacacttcaaataaaaggatatataagcacttgacaaattgagggagaaggaggggagagtgctgggcgctcgag

SEQ ID NO: 1478 - DNA (cDNA), 280 bp; double-stranded, linear
gaattcggccaaagaggcctagagattcagtttattctatactcagactttggtatccccttagatgcccatgtcaaaaatgagaaagttggtgacatggtatggcattttattgctttttgtttgttttccattgctactttcactcaaattccaaggaaatcacagaagaagggcttttggtgacctaaaagtagaaatgaaagcaacaaaatgcattctgtccagcagtacactgaagacaaaaaatgtagttgaaaagtctcagggagcgctcgag

SEQ ID NO: 1479 - DNA (cDNA), 491 bp; double-stranded, linear
gaattcggccaaagaggcctaatttgctttgcccagtagttggaaagtgaactcgactcgtgatggttctcctgtcactttggttgatagcagccgctctggtagaggttaggacttcagctgatggacaagctggtaatgaagaaatggtgcaaatagatttaccaataaagagatatagagagtatgagctggtgactccagtcagcacaaatctagaaggacgctatctctcccatactctttctgcgagtcacaaaaagaggtcagcgagggacgtgtcttccaaccctgagcagttgttctttaacatcacggcatttggaaaagattttcatctgcgactaaagcccaacactcaactagtagctcctggggctgttgtggagtggcatgagacatctctggtgcctgggaatataaccgatcccattaacaaccatcaaccaggaagtgctacgtatagaatccggaaaacagagccactcgag

SEQ ID NO: 1480 - DNA (cDNA), 523 bp; double-stranded, linear
gaattcggccaaagaggcctaattcattcagtcgtcatgagttgagtgcttactacatgcaaggcactctgctagttatattctaataatgcagagataattagacatggttcccgccctcaagaagctcacaaaagtattcaggaaataatgcagactagtgattttgctataaaattatttttgaaggaagcagacacagcagtatttacctgtaggtggagcaagtaataagccatgctgtgcaatatatacataaagcttctgcttctcatgggaatttagttacagtgcttggaatgagaaggggaaggaaagaattaacaaatgccaagatttctggagcagattgtacagctgtgactttggaaaacagaaagtaagaccctcagaaaaccaatgaagtctaagagaaataaaatttagtggacaggtatgaaaagtgtaattgcgcctaactaccagatggagaccttcagaatgggctatccttagagtctagtacatcaagagacccctcgag

SEQ ID NO: 1481 - DNA (cDNA), 104 bp; double-stranded, linear
gaattcggccaaagaggcctaaaaaaaaaaaaaaaagaagatataagctactagtatcaaaaatgaaagaggggctgtttctactgatcctgcagacactcgag

SEQ ID NO: 1482 - DNA (cDNA), 337 bp; double-stranded, linear
gaattcggccaaagaggcctaaactgaactaagagatgcacctgagaaaaccttggcttgcatgggtttggcaatacatcaggtgttaactaaggaccttgaaaggcatgcagctgagttacaagcccaggaaggattgtctaatgatggagaaacaatggtaaatgtgccacatattcatgcaaggtgaggaatttgatgtattaaagtattacttagaatgggacattgaaggccatttaagaatgaanacgctcattttataaaaatgaggaaatcagtaaaaaggacatgagttccttgccatctcattgatcatcacactgaacaactcgag

SEQ ID NO: 1483 - DNA (cDNA), 168 bp; double-stranded, linear
cgattgaattctagacctgcctcgagagcgcgctgttgaatacccagtatgatggtccttagccttcttagacctttcctgtaccactacctctatgccttttgccaagtccaagtgttcaccagaaatggaactgatgccagaaagactacagcaacaatactcgag

SEQ ID NO: 1484 - DNA (cDNA), 478 bp; double-stranded, linear
gaattcggccaaagaggcctagcaaccgcgcctggctgccttttcatttttaaaaacgtcagtgtcgctcccacacaacatgcaaaccctcctgccgagctgcgaccttcgcctgtcacggaacctggtgctgagtgtggtgagagtgaatcctgcagcacgtggcgcactgtcggcctctttcatgtttagcttttgattgtgcttattgtccatttgtatttcttcttctaagtgtctgttcaagacttttccgtcttggctggaggtgggaggtgcctgctcctgtgttttctggcatctttctctgctgtctttgtgtgtctgcactcagggagtttccctggggtgtgtgcctagagaggtgctggttgtacatttcaacgtagggacagattcccagcgtgtctttaaaggagctgtgccgctgtgtgctcacttgactcgccggcgttcttgtttctccaggcctctcgag

SEQ ID NO: 1485 - DNA (cDNA), 307 bp; double-stranded, linear
gaattcggccaaagaggcctacacactgcaagaacagagccaagaacctaccatgtaccctttacttggatttatcattactgttttgcacatttgctttatcattcttgttatatttacatatagttccttccccttggattatttgagaacaaactgcagaactcacacctctttccccgaagaactaggcattagcacattacaagaatacgatgatagagatcagaagttaaatgctgatgagatattcctgtctaatccacgaaccttatttcattgtcatcagttgtcccaacagctcgag

SEQ ID NO: 1486 - DNA (cDNA), 579 bp; double-stranded, linear
gaattcggccaaagattgctgtccttcaacgtgttcattatgaagttattagtaatacttttgttttctggacttataactggttttagaagtgactcttcctctagtttgccacctaagttactactagtatcctttgatggcttcagagctgattatctgaagaactatgaatttcctcatctccagaattttatcaaagaaggtgttttggtagagcatgttaaaaatgtttttatcacaaaaacatttccaaaccactacagtattgtgacaggcttgtatgaagaaagccatggcattgtggctaattccatgtatgatgcagtcacaaagaaacacttttctgactctaatgacaaggatcctttttggtggaatgaggcagtacctatttgggtgaccaatcagcttcaggaaaacagatcaagtgctgctgctatgtggcctggtactgatgtacccattcaggataccatctcttcctattttatgaattacaactcctcagtgtcatttgaggaaagactaaataatattactatgtggctaaacaattcgaacccaccagtcctcgag

SEQ ID NO: 1487 - DNA (cDNA), 352 bp; double-stranded, linear
gaattcggccaaagaggcctagattgaattctagacctgcctcgagagtcacgcttagtttgccattgtgccagctagtgatattgctgatgttttttgtgggtgttcttttagcaaaacgtgaatgaatgcatgtttacagggatgctctggactggaggatggtgaaatccatcgtggttgtccctctccctgaatgtccttttgtagccagggcatctttccaatatgaattattaagccttaacttacatttttgcataacttataactctccattatatatttggttacatttcttagatgttttcaacattctttattaaagttattttatcagcatccgctcgag

SEQ ID NO: 1488 - DNA (cDNA), 422 bp; double-stranded, linear
gaattcggccaaagaggcctacaaatgggcagaagtgaaacagtcttgtgagatacctgttttttaaaactccattttagaaaaggaattaactaggactttatatctcttcgttcaatataattttaaagaagaattgttgaaaagtagatatgttttgccatttgctgagaatattttgtacgttagcttgtctcttacaaaaactaaatgtgttcctacttctgataatgtatgtcaatttaaaatttggaatggccaagataagttgctctgcatctgtccttcatatggctcctgagcacagctcagtgactggcccttgcagtgcttctaccgttgtaatgggtaaaaccaggggaaactgccttgctcttgagcttgagcaggttaatcaaaaggatagagcttccactctcgag

SEQ ID NO: 1489 - DNA (cDNA), 293 bp; double-stranded, linear
gaattcggccaaagaggcctagagaaagagagaaagaaaggagggaaggaaaggaaggaaggaaggaaagaaggaaagaaggaaagagaggagactgaagggccaaggagggcatacaatggaagatgagagctgtgctcccgggaggcttgtactcatcaagaaagaaaggagaaagagggggaagaaaagaaaaaaaaagaataaagaaaggagagatgaaggaataaaggaaaaaaagtagaaaggaaagaaggagaagggagagaagaaagtaggaaggagaactcgag

SEQ ID NO: 1490 - DNA (cDNA), 250 bp; double-stranded, linear
gaattcggccaaagaggcctagtgcaactacagataagtaaacttcgactgggtttagtaacacctgtctttaatatttgtcagtgtacctacattgataacattgacctttggaaaaattggacttgtattgtgttatttctctagcatattagtcctaaaaaagtgtgagtaataggagatggagaggtgtttgtggattgtcattctgtggttcctacagcattcaagttgcgtccgtacgctcgag

SEQ ID NO: 1491 - DNA (cDNA), 435 bp; double-stranded, linear
gaattcggccttcatggcctaattcttagaaataaagccactatcatgcaggttatttacaagtaaaaacatggagtcagcccagtagagaaacgttcaaatagtgtggctcctgctctgccacgttctgtttatgactttggatattttatttatcctttctggggtagtttttcaactttaaggtcctaataaacttttagattttatgacctgtcctctttagccctgtaagatttaaatattataaagaacctgatttcaaagacactggtaaacttggacaactaaacaagtccaagtatggtacttatttgtgtgtgtgcatatattaaccttatgcatatgctgttttcacacctatttaaactgtttttgaaaaacgtatatatcagtttttggaaaacagaagaagattttaaacggctactcgag

SEQ ID NO: 1492 - DNA (cDNA), 360 bp; double-stranded, linear
gcgattgaatacatgttcaataaggacaatggacaggcaccttttaccatcactcctgtgttttcagattttccagtccatgggatggagcccatgaacaatgccaccaaaggctgtgacgagtctgtggatgaggtcacagcaccatgtagctgccaagactgctctattgtctgtggccccaagccccagcccccacctcctcctgctccctggacgatccttggcttggacgccatgtatgtcatcatgtggatcacctacatggcgtttttgcttgtgttttttggagcattttttgcagtgtggtgctacagaaaacggtattttgtctccgagtacactcccatcgatctcgag

SEQ ID NO: 1493 - DNA (cDNA), 271 bp; double-stranded, linear
gaattcggccttcatggcctaagcagacaatatagtagtaatttaaatttttgtttcctgactttctgtagtccctaaacaaacaacaaaaaatcctagtaatcttaaacttttacattaatagagatccaagagaaaataagccatttttcaccattgtggacccaaataaatcatagacatggtattaagaagcccttttcagtctggttgcagtattattttcctacctttctttttcctgttccctgctgtatgcccacagctcgag

SEQ ID NO: 1494 - DNA (cDNA), 310 bp; double-stranded, linear
gaattcggccttcatggcctaatgggtcagaaatttgggcctggctaagtggatcctccaccccagggtctctcacaaggctgcaatcaaagggctgactaggacttggaatctcatttgaaagttagattggggaaggatctgcttccaagctcactcagtagttactggcaggattaggtttctccaaggtcgttggactaagggtctcagttcctcactgacagttggcctgaggctgccttcagtttcttgccatgtgggcctccccagcataactgtttacttcatcaaaacaaacaaactcgag

SEQ ID NO: 1495 - DNA (cDNA), 138 bp; double-stranded, linear
gaattcggccaaagaggcctacgtcgattgaattctagacctgcctcagctctaattatggttcatgttagattgtctgcccttcctcttcctcttctcttttggggaaagataatagcacttaataacgccctcgag

SEQ ID NO: 1496 - DNA (cDNA), 102 bp; double-stranded, linear
gaattcggccaaagaggcctacaaaattgttccttttacgtacgacagacttctgaaatggtagtagtagtagtgccctttttttttctctttttagcccag

SEQ ID NO: 1497 - DNA (cDNA), 483 bp; double-stranded, linear
gaattcggccaaagaggcctatttgtttctttgtactgcctaactttagaaagacctgnaancggtancatgaaaacatttttagagagaattaccaggcatttttggtagaatgagtgtttaatggaacagtccagagaactcatcaaagatgtttattaaaacgcgcagacctgctccaattaagggcccagtcagtggtgttaacagtgaagggactgttccagaggcgtgctgcacgggacgcccaccccaaatacaaatggtttgccagtagctcacaaatgaaccccattgccttgcacttaagcttcctgaagcacatacatatcctgctttgtgctttccgccctatagtaaacgcaaaccaatggagatgtgaagcaatctaatagcaacaaggcaaacctctacttcctctaaagaggattgcatcctcttgctatctttgccgatgctctcctacagacccatccgctcgag

SEQ ID NO: 1498 - DNA (cDNA), 144 bp; double-stranded, linear
gaattcggccaaagaggcctaaaatttcaataggctatagagttttccatgagagtgtgtgtgtgtgtgtgtgtgtgtgtgtgtaaagaactcttacatttcagtgagaaaatattttcattgaaaggaaacacagaactcgag

SEQ ID NO: 1499 - DNA (cDNA), 418 bp; double-stranded, linear
gaattcggccaaagaggcctaaaataactgtccaattaactgaacactgaggtagctgggtacagactttagcggctacatttgacaaacattgcaattacaagcagcaacacaaaccaaccttgggatggggatagaaatcttttcnttcttcnttcttgggggtttgagacagagtctcgctctgtcacccaggccggagtgcagtggcgcaatctccgctcactgcaaactccacctcctgggttcaagtgatcctcctgcctcagcctcccaagtagcttggattatgggtgcccaccaccatgcctggctaatttttgtatgtttgatagaaacggtgtttcaccctgttgaccaggctggccttgagctcctgacttcaggtgatccacctgcctcagccccccgactcgag

SEQ ID NO: 1500 - DNA (cDNA), 337 bp; double-stranded, linear
gaattcggccaaagaggcctacaaagaccaaggtatcacattctgccattagctgctacctctcccttccccattttcagacagattgagcccactttttgtgtcctcctctgctcttaagctgtttctcatcgtgggtgctcagcaacttgtctgctctcactctagtttctatttgcttccctgaaattagcctttaactatgcccagacaagccagagccttgcctaaacttctaattcctctgtgcttcttagtgtatcctttctgcctgcttgcctgcctgccttcctgcctgcttgcctgccttactgaccctttgccccacgctctcgag

SEQ ID NO: 1501 - DNA (cDNA), 105 bp; double-stranded, linear
gaattcggccaaagaggcctaaaccgtcgattgaattctagaccagcctcatctcctgttcctctctccctcccaactatgttggcctccctgctgctcctcgag

SEQ ID NO: 1502 - DNA (cDNA), 701 bp; double-stranded, linear
gaattcggccaaagaggcctactgtgaacctaaaactcctataaagaaaagtaaagtcttaaaaacaaacaaatacacagcaacaatcttattttccccagcctgtcttatgttagggtgcagatgtgatttctgtgtggctaatcagatgcccttgtgtgagagactgatttgaacagaggcaggggcatccatctttctagtgtcagtcacagcagaagcagtgaggtcctggtgtctgtcgctgcagtggtggcttttgatacaggagttccctgatggcagtagcttctttgtgggttcagttctgttgtgtggttctgcaagttcagcttagagtctgtttcttcagctgtttcaatgaccctctgagctgtctaccatgaaaaattctatcctgcttacactaattagagccaatcctgttatttacaaatgaatatcctgaccagtaatgaaggtctagacttaactgtaatattttatgacttaaattgttggcatatgtgaaaactttttgtttattctaaacttttttgttgttgttgtaaaataaaacatttatgaaaagcgcaccaaaaaggataacaaatgagagtaatgcaacatacaggcaccagcaactcaggccagggagatgatatatgagcatccccaatctcccctttacactccctcaaataactcaatcaagactcgag

SEQ ID NO: 1503 - DNA (cDNA), 257 bp; double-stranded, linear
gaattcggccttcatggcctaggaactaggtgactttggggctcatctcacaagtttccttacacttagggatcagtcttttgcttcctgttgtcctctgcctgaaagtagttgccaagttgtactgttttatatatccaccacagcatgagttaaaccaaagtctggatcagcagactgccagatttttttttaacaaatttattaatcaatacattttgtccatgtctacagttgtttatgggggagaactcgag

SEQ ID NO: 1504 - DNA (cDNA), 277 bp; double-stranded, linear
gaattcggccttcatggcctaggggaccttgggagaatgtaatccctgcccctagtctcagtttctgcatccacggaagaggggtgaagatggtccctacccctccagaatgttctttttttttttttttaaaaaaaaaaaaaaaaaaaaaaagtacgttatgttttcagataagaacacttcttcatggatgacttgaaataattgccatggtccctaagttttcctctctgtagatgaatgatatagctcagtatctaagcagtggatcctcgag

SEQ ID NO: 1505 - DNA (cDNA), 341 bp; double-stranded, linear
gaattcggccttcatggcctagacctgcctcgagcctcccaagctgctggtattacaggcgtgaaccactgcacctggcctaatacgatattcttacaatttaaaaaatgaaagcagaggaatggtggcagggaagctgacattttaagagttcacttccttgtagttatcacagttaattcttactgttagaataagtggtaacttgccaaggtcacattgctagatgtcagagcagaaattagaaatcaggtctagccaaggccatcacacttctcagagcattaacaattcaattcagttagtgtttattgaacacctattgtgttctggccctcgag

SEQ ID NO: 1506 - DNA (cDNA), 270 bp; double-stranded, linear
gaattcggccttcatggcctaggcattttgtctctagaattacccacccgttcctgcgctctacggttctccatgccccctccagtttgggggtctaaaccgaacaggagaggtgcaggggaccaggaggtgtcctggcacaaaggttcgggggtctccctggcaaggggtcccagggcctggagcccgaggcccagccaaaagcacacagcatcaaaacatgtttttagtgggaagctccaggccctgcccctccccgggggcctcgag

SEQ ID NO: 1507 - DNA (cDNA), 462 bp; double-stranded, linear
gaattcggccttcatggcctagagcaggaagattgtgtgagtgctggggtttgggggtgcccaagttgggaaccagtggagggagagagaggtaggaggtagatggatggagatcaaaggccaggcctgtggccaagggggctgctaacccttcaaccctgtgttagcctgtacactcaccaggccaggctcagcaggcgggctgttcacctcctggcagcaaatggtccagaatgtgccctcgctgcagcccagctggctccagaagggggaccacagaggctggagctatgcatgcacagtgctttctcccaaccttgcttctgagaaaagtgtccctgcgagggccctggaggagggagctagggaccagcagaagggcctaggtttctgtagcatcatttttagccctggctgaatctgggaagcacctggtggctttaacattcccgttagctcgag

SEQ ID NO: 1508 - DNA (cDNA), 694 bp; double-stranded, linear
gaattcggccttcatggcctagtcacaatccacttaaagaagtttggttatatttcagtgaaaattttcttccagagtaggttttttttcgtgggttggggggtaactttactacaattagtaagtatggtgcagaatttcatgcaaatgaggagtgccagcagtgtgataatttaaacatatttaaacaaaaacaaaaaaaatgaatgcacaaacttgctgctgcttagatcactgcagcttctaggacccggtttcttttactgatttaaaaacaaaacaaaaaaaaataaaaaagttgtgcctgaaatgaatcttgtttttttttataagtagccgcctggttactgtgtcctgtaaaatacagacacttgacccttggtgtagcttctgttcaactttatatcacgggaatggatgggtctgatttcttggccctcttcttgaattggccatatacagggtccctggccagtggactgaaggctttgtctaagatgacaagggtcagctcaggggatgtgggggagggcggttttatcttcccccttgtcgtttgaggttttgatctctgggtaaagaggccgtttatctttgtaaacacgaaacatttttgctttctcaagttttctgttaatggcgaaagaatggaagcgaataaagttttactgatttttgagacactagactcgag

SEQ ID NO: 1509 - DNA (cDNA), 490 bp; double-stranded, linear
gaattcggccttcatggcctaatgaggttctatctagaggtgatgggagacagtgacagatcatcaggcattagattctcataaggactgcgcaacctagatcccttgaatgaacagttcacaatagggttcactctccaatgagaatctaatgctgccgctgatctgacaggtgccagagctcaggcggtaatacgagaggctggagatacagataaagcttcagttgcttgcccgccacttacctcctcttgtgcggcccagttcctaacaggccacagaccgctaccagtccatggcctggaagttggggacccctctactgggatatttataattgcatatgtggttacctaatatttccatgatacaacactggtctagattctaggccattctccttcaaaaagaaccctgcttccttacagttttactgtttagcagcaatgttttctaccccttcttaaaattttcagccaccacactcgag

SEQ ID NO: 1510 - DNA (cDNA), 313 bp; double-stranded, linear
gaattcggccttcatggcctactctctcattcctaccctcctcccctccactcacgctcctcccaatccccaaggtcctctcattcccaccttcctcccttcctctcctcacgctcctccctatccccgagctcctctctcatccctaccctcctcccctccactcacgctcctcccaatccccaaggtcctctcattcccaccttcctcccttcctctcctcacgctcctccctatccccgagctcctctctcactccctccctcctctcatgctcctcccccctctcctcatgctcctccccatcctcgag

SEQ ID NO: 1511 - DNA (cDNA), 354 bp; double-stranded, linear
gccgggtgggccggaggtggcgcggccgcacggctttgttccggaaagcccttaggtggagagcgatgtggggcgcggcagggggatcgcgtagaggaaccttcgcgcaccgcctctccgggtctgggaatctgctgaactccttgcctctcttggggtccctcgaacgccccagctaagaagggcgggggccttgccagggcgcgagcaacatgacgttcaaggtcttcctgtggcttctgtaaagaaatgttcacgtgggagcctgtccacatgggctgtactaaggatctggcacgaggaagaaatatcactgcagaacctgaagccctccgttggaagggtcacctcgag

SEQ ID NO: 1512 - DNA (cDNA), 407 bp; double-stranded, linear
gaattcggccaaagaggcctagagcagcttggctaaaagtaagggtgtcgtgctgatggccctgtgcgcactgacccgcgctctgcgctctctgaacctggcgcccccgaccgtcgccgcccctgccccgagtctgttccccgccgcccagatgatgaacaatggcctcctccaacagccctctgccttgatgttgctcccctgccgcccagttcttacttctgtggcccttaatgccaactttgtgtcctggaagagtcgtaccaagtacaccattacaccagtgaagatgaggaagtctgggggccgagaccacacaggtgggaacaaggacagggggatttaagcagtcaaaaggaaaaacatgttaagaccctagacttgtatattgacacacagaactcgag

SEQ ID NO: 1513 - DNA (cDNA), 422 bp; double-stranded, linear
gaattcggccaaagaggcctacattcatacaattacagaattcaaatattgcaaaaggatgtgtgtctttctccccgagctcccctgttccccttcattgaaaaccaccacggtgccatctcttgtgtatgcagggctatgcacctgcaggcacgtgtgtatgcactccccgcttgtgtttacacaagctgtggggtgttacgcatgcctgcttttttcacttaataatacagcttggagagatttttgtatcacattataaatcccactcgctctttttgatggccacataataactactgcataatatggatacgccttatttgatttaactagttccctaatgatggacttttaagttgtttcctttttttttcttttttgctactgcaaacgatgctatctaggcctctttggccgaa

SEQ ID NO: 1514 - DNA (cDNA), 485 bp; double-stranded, linear
gaattcggccaaagaggcctatggaaattcaagacctgatgtttgaggagatgagggaaactcttaaaaatgacctaaaagcagttttaggaggaaaagctacaatacctgaggtaaagaattcagagaactccagtagtaggacagagtttcagcaaataatcaatttagcattacaaaaaacagggatggtagggaaaatagaaggagaaaactctaaaataggtgatgataatgaaaatttaacctttaaattagaagtaaatgagctgagtggtaaattagacaacactaacgaatacaatagtaatgatggtaagaaattaccccagggtgaatcacgaagttacgaagtcatgggaagtatggaagaaaccttatgcaatatagatgacagagatggaaatcgcaatgtccatttagaatttacagaaagagagagtaggaaggatggagaggatgaatttgtcaaagaaaaactcgag

SEQ ID NO: 1515 - DNA (cDNA), 400 bp; double-stranded, linear
gaattcggccaaagaggcctaggcacagaagggtggtgagtgtgatcaaatctagtctcactcccactttttagtctcactcctacttttgtccaccacccaggcacggagagaaaggaatgtttagcacaagacacagcggagctcgggattggctaaactcccatagtatttatggtggccgccggcgggggccccagcccagcttgcaggccacctctagctttcttcctaccccattcccggcttccctcctcctcccctgcagcctggttaggtggatacctgccctgacatgtgaggcaagctaaggcctggagggtcagatgggagaccaggtcccaagggagcaagacctcgcgaagcgcagcagccccggccctaggcctctttggccgaa

SEQ ID NO: 1516 - DNA (cDNA), 145 bp; double-stranded, linear
gaattcgcggccgcgtcgacgtcgacgcggccgcgaattcggccaaagaggcctacccatgtcaatcaagatgggtgattatgaaatgccagacttctaaaataaatgttttggaattcaatgggtaaataaatgctggctcgag

SEQ ID NO: 1517 - DNA (cDNA), 277 bp; double-stranded, linear
gctggacctcctgtgcaagaacatgaaacagctgtggttcttccttctcctggtggcagctcccagatcggttctgtcccaggtgcagctgcgggagtcgggcccaggactggtgaagccttcggagaccctgtccctcacctgcactgtctctggtacttccgtcagaagtgttagttacgactggagttggctccggcagtccccggggaagggactggagtggcttggagagattgattacagggggagaggcaattacaacccgtccctcgag

SEQ ID NO: 1518 - DNA (cDNA), 161 bp; double-stranded, linear
gaattcggccaaagaggcctactcatgcacctaattggatcctatctttgtgttgttagctggttattatgcagactttattatgtggttgttttatagtgtccataacctatgtacttaagtttgtttttgtggtggcgcttccaattagggctctcgag

SEQ ID NO: 1519 - DNA (cDNA), 561 bp; double-stranded, linear
gaattcggccttcatggcctaatataaaacaatgtttttcaaggcattatataataggctaaggacagtgacctccaagagacagcaaacaaggtaatacctgtgactgctccagcttactgccttgagagaattaatagtaggtttgtggtacagggagggagaatccagtcagagcccagcggacttgctgaattaaggaaatggagctgagagtccagagagaccaacatggctaaagttgtcatgacagagcactcagaactagagagctgcacagcaacataacctaagagctctgaagataatctccctcaaatactcagctgagtactgatcaacatatatgtgtgaggaagctatctgaggctgacaaagaactgcctgaagagattagagggaacagtacttggcactcacacagaattggaaactgtacctgttcccaccagccaaactggaaaaacctcaggattcatggggtactcagaaaggacttgcatcaggtatggggaataattagccctagacagagcactgctctaatcccatccactcgag

What is claimed is:

1. An isolated polynucleotide comprising a nucleotide sequence selected from the group consisting of:
SEQ ID NO:1, SEQ ID NO:2, SEQ ID NO:3, SEQ ID NO:4, SEQ ID NO:5, SEQ ID NO:6, SEQ ID NO:7, SEQ ID NO:8, SEQ ID NO:9, SEQ ID NO:10, SEQ ID NO:11, SEQ ID NO:12, SEQ ID NO:13, SEQ ID NO:14, SEQ ID NO:15, SEQ ID NO:16, SEQ ID NO:17, SEQ ID NO:18, SEQ ID NO:19, SEQ ID NO:20, SEQ ID NO:21, SEQ ID NO:22, SEQ ID NO:23, SEQ ID NO:24, SEQ ID NO:25, SEQ ID NO:26, SEQ ID NO:27, SEQ ID NO:28, SEQ ID NO:29, SEQ ID NO:30, SEQ ID NO:31, SEQ ID NO:32, SEQ ID NO:33, SEQ ID NO:34, SEQ ID NO:35, SEQ ID NO:36, SEQ ID NO:37, SEQ ID NO:38, SEQ ID NO:39, SEQ ID NO:40, SEQ ID NO:41, SEQ ID NO:42, SEQ ID NO:43, SEQ ID NO:44, SEQ ID NO:45, SEQ ID NO:46, SEQ ID NO:47, SEQ ID NO:48, SEQ ID NO:49, SEQ ID NO:50, SEQ ID NO:51, SEQ ID NO:52, SEQ ID NO:53, SEQ ID NO:54, SEQ ID NO:55, SEQ ID NO:56, SEQ ID NO:57, SEQ ID NO:58, SEQ ID NO:59, SEQ ID NO:60, SEQ ID NO:61, SEQ ID NO:62, SEQ ID NO:63, SEQ ID NO:64, SEQ ID NO:65, SEQ ID NO:66, SEQ ID NO:67, SEQ ID NO:68, SEQ ID NO:69, SEQ ID NO:70, SEQ ID NO:71, SEQ ID NO:72, SEQ ID NO:73, SEQ ID NO:74, SEQ ID NO:75, SEQ ID NO:76, SEQ ID NO:77, SEQ ID NO:78, SEQ ID NO:79, SEQ ID NO:80, SEQ ID NO:81, SEQ ID NO:82, SEQ ID NO:83, SEQ ID NO:84, SEQ ID NO:85, SEQ ID NO:86, SEQ ID NO:87, SEQ ID NO:88, SEQ ID NO:89, SEQ ID NO:90, SEQ ID NO:91, SEQ ID NO:92, SEQ ID NO:93, SEQ ID NO:94, SEQ ID NO:95, SEQ ID NO:96, SEQ ID NO:97, SEQ ID NO:98, SEQ ID NO:99, SEQ ID NO:100, SEQ ID NO:101, SEQ ID NO:102, SEQ ID NO:103, SEQ ID NO:104, SEQ ID NO:105, SEQ ID NO:106, SEQ ID NO:107, SEQ ID NO:108, SEQ ID NO:109, SEQ ID NO:110, SEQ ID NO:111, SEQ ID NO:112, SEQ ID NO:113, SEQ ID NO:114, SEQ ID NO:115, SEQ ID NO:116, SEQ ID NO:117, SEQ ID NO:118, SEQ ID NO:119, SEQ ID NO:120, SEQ ID NO:121, SEQ ID NO:122, SEQ ID NO:123, SEQ ID NO:124, SEQ ID NO:125, SEQ ID NO:126, SEQ ID NO:127, SEQ ID NO:128, SEQ ID NO:129, SEQ ID NO:130, SEQ ID NO:131, SEQ ID NO:132, SEQ ID NO:133, SEQ ID NO:134, SEQ ID NO:135, SEQ ID NO:136, SEQ ID NO:137, SEQ ID NO:138, SEQ ID NO:139, SEQ ID NO:140, SEQ ID NO:141, SEQ ID NO:142, SEQ ID NO:143, SEQ ID NO:144, SEQ ID NO:145, SEQ ID NO:146, SEQ ID NO:147, SEQ ID NO:148, SEQ ID NO:149, SEQ ID NO:150, SEQ ID NO:151, SEQ ID NO:152, SEQ ID NO:153, SEQ ID NO:154, SEQ ID NO:155, SEQ ID NO:156, SEQ ID NO:157, SEQ ID NO:158, SEQ ID NO:159, SEQ ID NO:160, SEQ ID NO:161, SEQ ID NO:162, SEQ ID NO:163, SEQ ID NO:164, SEQ ID NO:165, SEQ ID NO:166, SEQ ID NO:167, SEQ ID NO:168, SEQ ID NO:169, SEQ ID NO:170, SEQ ID NO:171, SEQ ID NO:172, SEQ ID NO:173, SEQ ID NO:174, SEQ ID NO:175, SEQ ID NO:176, SEQ ID NO:177, SEQ ID NO:178, SEQ ID NO:179, SEQ ID NO:180, SEQ ID NO:181, SEQ ID NO:182, SEQ ID NO:183, SEQ ID NO:184, SEQ ID NO:185, SEQ ID NO:186, SEQ ID NO:187, SEQ ID NO:188, SEQ ID NO:189, SEQ ID NO:190, SEQ ID NO:191, SEQ ID NO:192, SEQ ID NO:193, SEQ ID NO:194, SEQ ID NO:195, SEQ ID NO:196, SEQ ID NO:197, SEQ ID NO:198, SEQ ID NO:199, SEQ ID NO:200, SEQ ID NO:201, SEQ ID NO:202, SEQ ID NO:203, SEQ ID NO:204, SEQ ID NO:205, SEQ ID NO:206, SEQ ID NO:207, SEQ ID NO:208, SEQ ID NO:209, SEQ ID NO:210, SEQ ID NO:211, SEQ ID NO:212, SEQ ID NO:213, SEQ ID NO:214, SEQ ID NO:215, SEQ ID NO:216, SEQ ID NO:217, SEQ ID NO:218, SEQ ID NO:219, SEQ ID NO:220, SEQ ID NO:221, SEQ ID NO:222, SEQ ID NO:223, SEQ ID NO:224, SEQ ID NO:225, SEQ ID NO:226, SEQ ID NO:227, SEQ ID NO:228, SEQ ID NO:229, SEQ ID NO:230, SEQ ID NO:231, SEQ ID NO:232, SEQ ID NO:233, SEQ ID NO:234, SEQ ID NO:235, SEQ ID NO:236, SEQ ID NO:237, SEQ ID NO:238, SEQ ID NO:239, SEQ ID NO:240, SEQ ID NO:241, SEQ ID NO:242, SEQ ID NO:243, SEQ ID NO:244, SEQ ID NO:245, SEQ ID NO:246, SEQ ID NO:247, SEQ ID NO:248, SEQ ID NO:249, SEQ ID NO:250, SEQ ID NO:251, SEQ ID NO:252, SEQ ID NO:253, SEQ ID NO:254, SEQ ID NO:255, SEQ ID NO:256, SEQ ID NO:257, SEQ ID NO:258, SEQ ID NO:259, SEQ ID NO:260, SEQ ID NO:261, SEQ ID NO:262, SEQ ID NO:263, SEQ ID NO:264, SEQ ID NO:265, SEQ ID NO:266, SEQ ID NO:267, SEQ ID NO:268, SEQ ID NO:269, SEQ ID NO:270, SEQ ID NO:271, SEQ ID NO:272, SEQ ID NO:273, SEQ ID NO:274, SEQ ID NO:275, SEQ ID NO:276, SEQ ID NO:277, SEQ ID NO:278, SEQ ID NO:279, SEQ ID NO:280, SEQ ID NO:281, SEQ ID NO:282, SEQ ID NO:283, SEQ ID NO:284, SEQ ID NO:285, SEQ ID NO:286, SEQ ID NO:287, SEQ ID NO:288, SEQ ID NO:289, SEQ ID NO:290, SEQ ID NO:291, SEQ ID NO:292, SEQ ID NO:293, SEQ ID NO:294, SEQ ID NO:295, SEQ ID NO:296, SEQ ID NO:297, SEQ ID NO:298, SEQ ID NO:299, SEQ ID NO:300, SEQ ID NO:301, SEQ ID NO:302, SEQ ID NO:303, SEQ ID NO:304, SEQ ID NO:305, SEQ ID NO:306, SEQ ID NO:307, SEQ ID NO:308, SEQ ID NO:309, SEQ ID NO:310, SEQ ID NO:311, SEQ ID NO:312, SEQ ID NO:313, SEQ ID NO:314, SEQ ID NO:315, SEQ ID NO:316, SEQ ID NO:317, SEQ ID NO:318, SEQ ID NO:319, SEQ ID NO:320, SEQ ID NO:321, SEQ ID NO:322, SEQ ID NO:323, SEQ ID NO:324, SEQ ID NO:325, SEQ ID NO:326, SEQ ID NO:327, SEQ ID NO:328, SEQ ID NO:329, SEQ ID NO:330, SEQ ID NO:331, SEQ ID NO:332, SEQ ID NO:333, SEQ ID NO:334, SEQ ID NO:335, SEQ ID NO:336, SEQ ID NO:337, SEQ ID NO:338, SEQ ID NO:339, SEQ ID NO:340, SEQ ID NO:341, SEQ ID NO:342, SEQ ID NO:343, SEQ ID NO:344, SEQ ID NO:345, SEQ ID NO:346, SEQ ID NO:347, SEQ ID NO:348, SEQ ID NO:349, SEQ ID NO:350, SEQ ID NO:351, SEQ ID NO:352, SEQ ID NO:353, SEQ ID NO:354, SEQ ID NO:355, SEQ ID NO:356, SEQ ID NO:357, SEQ ID NO:358, SEQ ID NO:359, SEQ ID NO:360, SEQ ID NO:361, SEQ ID NO:362, SEQ ID NO:363, SEQ ID NO:364, SEQ ID NO:365, SEQ ID NO:366, SEQ ID NO:367, SEQ ID NO:368, SEQ ID NO:369, SEQ ID NO:370, SEQ ID NO:371, SEQ ID NO:372, SEQ ID NO:373, SEQ ID NO:374, SEQ ID NO:375, SEQ ID NO:376, SEQ ID NO:377, SEQ ID NO:378, SEQ ID NO:379, SEQ ID NO:380, SEQ ID NO:381, SEQ ID NO:382, SEQ ID NO:383, SEQ ID NO:384, SEQ ID NO:385, SEQ ID NO:386, SEQ ID NO:387, SEQ ID NO:388, SEQ ID NO:389, SEQ ID NO:390, SEQ ID NO:391, SEQ ID NO:392, SEQ ID NO:393, SEQ ID NO:394, SEQ ID NO:395, SEQ ID NO:396, SEQ ID NO:397, SEQ ID NO:398, SEQ ID NO:399, SEQ ID NO:400, SEQ ID NO:401, SEQ ID NO:402, SEQ ID NO:403, SEQ ID NO:404, SEQ ID NO:405, SEQ ID NO:406, SEQ ID NO:407, SEQ ID NO:408, SEQ ID NO:409, SEQ ID NO:410, SEQ ID NO:411, SEQ ID NO:412, SEQ ID NO:413, SEQ ID NO:414, SEQ ID NO:415, SEQ ID NO:416, SEQ ID NO:417, SEQ ID NO:418, SEQ ID NO:419, SEQ ID NO:420, SEQ ID NO:421, SEQ ID NO:422, SEQ ID NO:423, SEQ ID NO:424, SEQ ID NO:425, SEQ ID NO:426, SEQ ID NO:427, SEQ ID NO:428, SEQ ID NO:429, SEQ ID NO:430, SEQ ID NO:431, SEQ ID NO:432, SEQ ID NO:433, SEQ ID NO:434, SEQ ID NO:435, SEQ ID NO:436, SEQ ID NO:437, SEQ ID NO:438, SEQ ID NO:439, SEQ ID NO:440, SEQ ID NO:441, SEQ ID NO:442, SEQ ID NO:443, SEQ ID NO:444, SEQ ID NO:445, SEQ ID NO:446, SEQ ID NO:447, SEQ ID NO:448, SEQ ID NO:449, SEQ ID NO:450, SEQ ID NO:451, SEQ ID NO:452, SEQ ID NO:453, SEQ ID NO:454, SEQ ID NO:455, SEQ ID NO:456, SEQ ID NO:457, SEQ ID NO:458, SEQ ID NO:459, SEQ ID NO:460, SEQ ID NO:461, SEQ ID NO:462, SEQ ID NO:463, SEQ ID NO:464, SEQ ID NO:465, SEQ ID NO:466, SEQ ID NO:467, SEQ ID NO:468, SEQ ID NO:469, SEQ ID NO:470, SEQ ID NO:471, SEQ ID NO:472, SEQ ID NO:473, SEQ ID NO:474, SEQ ID NO:475, SEQ ID NO:476, SEQ ID NO:477, SEQ ID NO:478, SEQ ID NO:479, SEQ ID NO:480, SEQ ID NO:481, SEQ ID NO:482, SEQ ID NO:483, SEQ ID NO:484, SEQ ID NO:485, SEQ ID NO:486, SEQ ID NO:487, SEQ ID NO:488, SEQ ID NO:489, SEQ ID NO:490, SEQ ID NO:491, SEQ ID NO:492, SEQ ID NO:493, SEQ ID NO:494, SEQ ID NO:495, SEQ ID NO:496, SEQ ID NO:497, SEQ ID NO:498, SEQ ID NO:499, SEQ ID NO:500, SEQ ID NO:501, SEQ ID NO:502, SEQ ID NO:503, SEQ ID NO:504, SEQ ID NO:505, SEQ ID NO:506, SEQ ID NO:507, SEQ ID NO:508, SEQ ID NO:509, SEQ ID NO:510, SEQ ID NO:511, SEQ ID NO:512, SEQ ID NO:513, SEQ ID NO:514, SEQ ID NO:515, SEQ ID NO:516, SEQ ID NO:517, SEQ ID NO:518, SEQ ID NO:519, SEQ ID NO:520, SEQ ID NO:521, SEQ ID NO:522, SEQ ID NO:523, SEQ ID NO:524, SEQ ID NO:525, SEQ ID NO:526, SEQ ID NO:527, SEQ ID NO:528, SEQ ID NO:529, SEQ ID NO:530, SEQ ID NO:531, SEQ ID NO:532, SEQ ID NO:533, SEQ ID NO:534, SEQ ID NO:535, SEQ ID NO:536, SEQ ID NO:537, SEQ ID NO:538, SEQ ID NO:539, SEQ ID NO:540, SEQ ID NO:541, SEQ ID NO:542, SEQ ID NO:543, SEQ ID NO:544, SEQ ID NO:545, SEQ ID NO:546, SEQ ID NO:547, SEQ ID NO:548, SEQ ID NO:549, SEQ ID NO:550, SEQ ID NO:551, SEQ ID NO:552, SEQ ID NO:553, SEQ ID NO:554, SEQ ID NO:555, SEQ ID NO:556, SEQ ID NO:557, SEQ ID NO:558, SEQ ID NO:559, SEQ ID NO:560, SEQ ID NO:561, SEQ ID NO:562, SEQ ID NO:563, SEQ ID NO:564, SEQ ID NO:565, SEQ ID NO:566, SEQ ID NO:567, SEQ ID NO:568, SEQ ID NO:569, SEQ ID NO:570, SEQ ID NO:571, SEQ ID NO:572, SEQ ID NO:573, SEQ ID NO:574, SEQ ID NO:575, SEQ ID NO:576, SEQ ID NO:577, SEQ ID NO:578, SEQ ID NO:579, SEQ ID NO:580, SEQ ID NO:581, SEQ ID NO:582, SEQ ID NO:583, SEQ ID NO:584, SEQ ID NO:585, SEQ ID NO:586, SEQ ID NO:587, SEQ ID NO:588, SEQ ID NO:589, SEQ ID NO:590, SEQ ID NO:591, SEQ ID NO:592, SEQ ID NO:593, SEQ ID NO:594, SEQ ID NO:595, SEQ ID NO:596, SEQ ID NO:597, SEQ ID NO:598, SEQ ID NO:599, SEQ ID NO:600, SEQ ID NO:601, SEQ ID NO:602, SEQ ID NO:603, SEQ ID NO:604, SEQ ID NO:605, SEQ ID NO:606, SEQ ID NO:607, SEQ ID NO:608, SEQ ID NO:609, SEQ ID NO:610, SEQ ID NO:611, SEQ ID NO:612, SEQ ID NO:613, SEQ ID NO:614, SEQ ID NO:615, SEQ ID NO:616, SEQ ID NO:617, SEQ ID NO:618, SEQ ID NO:619, SEQ ID NO:620, SEQ ID NO:621, SEQ ID NO:622, SEQ ID NO:623, SEQ ID NO:624, SEQ ID NO:625, SEQ ID NO:626, SEQ ID NO:627, SEQ ID NO:628, SEQ ID NO:629, SEQ ID NO:630, SEQ ID NO:631, SEQ ID NO:632, SEQ ID NO:633, SEQ ID NO:634, SEQ ID NO:635, SEQ ID NO:636, SEQ ID NO:637, SEQ ID NO:638, SEQ ID NO:639, SEQ ID NO:640, SEQ ID NO:641, SEQ ID NO:642, SEQ ID NO:643, SEQ ID NO:644, SEQ ID NO:645, SEQ ID NO:646, SEQ ID NO:647, SEQ ID NO:648, SEQ ID NO:649, SEQ ID NO:650, SEQ ID NO:651, SEQ ID NO:652, SEQ ID NO:653, SEQ ID NO:654, SEQ ID NO:655, SEQ ID NO:656, SEQ ID NO:657, SEQ ID NO:658, SEQ ID NO:659, SEQ ID NO:660, SEQ ID NO:661, SEQ ID NO:662, SEQ ID NO:663, SEQ ID NO:664, SEQ ID NO:665, SEQ ID NO:666, SEQ ID NO:667, SEQ ID NO:668, SEQ ID NO:669, SEQ ID NO:670, SEQ ID NO:671, SEQ ID NO:672, SEQ ID NO:673, SEQ ID NO:674, SEQ ID NO:675, SEQ ID NO:676, SEQ ID NO:677, SEQ ID NO:678, SEQ ID NO:679, SEQ ID NO:680, SEQ ID NO:681, SEQ ID NO:682, SEQ ID NO:683, SEQ ID NO:684, SEQ ID NO:685, SEQ ID NO:686, SEQ ID NO:687, SEQ ID NO:688, SEQ ID NO:689, SEQ ID NO:690, SEQ ID NO:691, SEQ ID NO:692, SEQ ID NO:693, SEQ ID NO:694, SEQ ID NO:695, SEQ ID NO:696, SEQ ID NO:697, SEQ ID NO:698, SEQ ID NO:699, SEQ ID NO:700, SEQ ID NO:701, SEQ ID NO:702, SEQ ID NO:703, SEQ ID NO:704, SEQ ID NO:705, SEQ ID NO:706, SEQ ID NO:707, SEQ ID NO:708, SEQ ID NO:709, SEQ ID NO:710, SEQ ID NO:711, SEQ ID NO:712, SEQ ID NO:713, SEQ ID NO:714, SEQ ID NO:715, SEQ ID NO:716, SEQ ID NO:717, SEQ ID NO:718, SEQ ID NO:719, SEQ ID NO:720, SEQ ID NO:721, SEQ ID NO:722, SEQ ID NO:723, SEQ ID NO:724, SEQ ID NO:725, SEQ ID NO:726, SEQ ID NO:727, SEQ ID NO:728, SEQ ID NO:729, SEQ ID NO:730, SEQ ID NO:731, SEQ ID NO:732, SEQ ID NO:733, SEQ ID NO:734, SEQ ID NO:735, SEQ ID NO:736, SEQ ID NO:737, SEQ ID NO:738, SEQ ID NO:739, SEQ ID NO:740, SEQ ID NO:741, SEQ ID NO:742, SEQ ID NO:743, SEQ ID NO:744, SEQ ID NO:745, SEQ ID NO:746, SEQ ID NO:747, SEQ ID NO:748, SEQ ID NO:749, SEQ ID NO:750, SEQ ID NO:751, SEQ ID NO:752, SEQ ID NO:753, SEQ ID NO:754, SEQ ID NO:755, SEQ ID NO:756, SEQ ID NO:757, SEQ ID NO:758, SEQ ID NO:759, SEQ ID NO:760, SEQ ID NO:761, SEQ ID NO:762, SEQ ID NO:763, SEQ ID NO:764, SEQ ID NO:765, SEQ ID NO:766, SEQ ID NO:767, SEQ ID NO:768, SEQ ID NO:769, SEQ ID NO:770, SEQ ID NO:771, SEQ ID NO:772, SEQ ID NO:773, SEQ ID NO:774, SEQ ID NO:775, SEQ ID NO:776, SEQ ID NO:777, SEQ ID NO:778, SEQ ID NO:779, SEQ ID NO:780, SEQ ID NO:781, SEQ ID NO:782, SEQ ID NO:783, SEQ ID NO:784, SEQ ID NO:785, SEQ ID NO:786, SEQ ID NO:787, SEQ ID NO:788, SEQ ID NO:789, SEQ ID NO:790, SEQ ID NO:791, SEQ ID NO:792, SEQ ID NO:793, SEQ ID NO:794, SEQ ID NO:795, SEQ ID NO:796, SEQ ID NO:797, SEQ ID NO:798, SEQ ID NO:799, SEQ ID NO:800, SEQ ID NO:801, SEQ ID NO:802, SEQ ID NO:803, SEQ ID NO:804, SEQ ID NO:805, SEQ ID NO:806, SEQ ID NO:807, SEQ ID NO:808, SEQ ID NO:809, SEQ ID NO:810, SEQ ID NO:811, SEQ ID NO:812, SEQ ID NO:813, SEQ ID NO:814, SEQ ID NO:815, SEQ ID NO:816, SEQ ID NO:817, SEQ ID NO:818, SEQ ID NO:819, SEQ ID NO:820, SEQ ID NO:821, SEQ ID NO:822, SEQ ID NO:823, SEQ ID NO:824, SEQ ID NO:825, SEQ ID NO:826, SEQ ID NO:827, SEQ ID NO:828, SEQ ID NO:829, SEQ ID NO:830, SEQ ID NO:831, SEQ ID NO:832, SEQ ID NO:833, SEQ ID NO:834, SEQ ID NO:835, SEQ ID NO:836, SEQ ID NO:837, SEQ ID NO:838, SEQ ID NO:839, SEQ ID NO:840, SEQ ID NO:841, SEQ ID NO:842, SEQ ID NO:843, SEQ ID NO:844, SEQ ID NO:845, SEQ ID NO:846, SEQ ID NO:847, SEQ ID NO:848, SEQ ID NO:849, SEQ ID NO:850, SEQ ID NO:851, SEQ ID NO:852, SEQ ID NO:853, SEQ ID NO:854, SEQ ID NO:855, SEQ ID NO:856, SEQ ID NO:857, SEQ ID NO:858, SEQ ID NO:859, SEQ ID NO:860, SEQ ID NO:861, SEQ ID NO:862, SEQ ID NO:863, SEQ ID NO:864, SEQ ID NO:865, SEQ ID NO:866, SEQ ID NO:867, SEQ ID NO:868, SEQ ID NO:869, SEQ ID NO:870, SEQ ID NO:871, SEQ ID NO:872, SEQ ID NO:873, SEQ ID NO:874, SEQ ID NO:875, SEQ ID NO:876, SEQ ID NO:877, SEQ ID NO:878, SEQ ID NO:879, SEQ ID NO:880, SEQ ID NO:881, SEQ ID NO:882, SEQ ID NO:883, SEQ ID NO:884, SEQ ID NO:885, SEQ ID NO:886, SEQ ID NO:887, SEQ ID NO:888, SEQ ID NO:889, SEQ ID NO:890, SEQ ID NO:891, SEQ ID NO:892, SEQ ID NO:893, SEQ ID NO:894, SEQ ID NO:895, SEQ ID NO:896, SEQ ID NO:897, SEQ ID NO:898, SEQ ID NO:899, SEQ ID NO:900, SEQ ID NO:901, SEQ ID NO:902, SEQ ID NO:903, SEQ ID NO:904, SEQ ID NO:905, SEQ ID NO:906, SEQ ID NO:907, SEQ ID NO:908, SEQ ID NO:909, SEQ ID NO:910, SEQ ID NO:911, SEQ ID NO:912, SEQ ID NO:913, SEQ ID NO:914, SEQ ID NO:915, SEQ ID NO:916, SEQ ID NO:917, SEQ ID NO:918, SEQ ID NO:919, SEQ ID NO:920, SEQ ID NO:921, SEQ ID NO:922, SEQ ID NO:923, SEQ ID NO:924, SEQ ID NO:925, SEQ ID NO:926, SEQ ID NO:927, SEQ ID NO:928, SEQ ID NO:929, SEQ ID NO:930, SEQ ID NO:931, SEQ ID NO:932, SEQ ID NO:933, SEQ ID NO:934, SEQ ID NO:935, SEQ ID NO:936, SEQ ID NO:937, SEQ ID NO:938, SEQ ID NO:939, SEQ ID NO:940, SEQ ID NO:941, SEQ ID NO:942, SEQ ID NO:943, SEQ ID NO:944, SEQ ID NO:945, SEQ ID NO:946, SEQ ID NO:947, SEQ ID NO:948, SEQ ID NO:949, SEQ ID NO:950, SEQ ID NO:951, SEQ ID NO:952, SEQ ID NO:953, SEQ ID NO:954, SEQ ID NO:955, SEQ ID NO:956, SEQ ID NO:957, SEQ ID NO:958, SEQ ID NO:959, SEQ ID NO:960, SEQ ID NO:961, SEQ ID NO:962, SEQ ID NO:963, SEQ ID NO:964, SEQ ID NO:965, SEQ ID NO:966, SEQ ID NO:967, SEQ ID NO:968, SEQ ID NO:969, SEQ ID NO:970, SEQ ID NO:971, SEQ ID NO:972, SEQ ID NO:973, SEQ ID NO:974, SEQ ID NO:975, SEQ ID NO:976, SEQ ID NO:977, SEQ ID NO:978, SEQ ID NO:979, SEQ ID NO:980, SEQ ID NO:981, SEQ ID NO:982, SEQ ID NO:983, SEQ ID NO:984, SEQ ID NO:985, SEQ ID NO:986, SEQ ID NO:987, SEQ ID NO:988, SEQ ID NO:989, SEQ ID NO:990, SEQ ID NO:991, SEQ ID NO:992, SEQ ID NO:993, SEQ ID NO:994, SEQ ID NO:995, SEQ ID NO:996, SEQ ID NO:997, SEQ ID NO:998, SEQ ID NO:999, SEQ ID NO:1000, SEQ ID NO:1001, SEQ ID NO:1002, SEQ ID NO:1003, SEQ ID NO:1004, SEQ ID NO:1005, SEQ ID NO:1006, SEQ ID NO:1007, SEQ ID NO:1008, SEQ ID NO:1009, SEQ ID NO:1010, SEQ ID NO:1011, SEQ ID NO:1012, SEQ ID NO:1013, SEQ ID NO:1014, SEQ ID NO:1015, SEQ ID NO:1016, SEQ ID NO:1017, SEQ ID NO:1018, SEQ ID NO:1019, SEQ ID NO:1020, SEQ ID NO:1021, SEQ ID NO:1022, SEQ ID NO:1023, SEQ ID NO:1024, SEQ ID NO:1025, SEQ ID NO:1026, SEQ ID NO:1027, SEQ ID NO:1028, SEQ ID NO:1029, SEQ ID NO:1030, SEQ ID NO:1031, SEQ ID NO:1032, SEQ ID NO:1033, SEQ ID NO:1034, SEQ ID NO:1035, SEQ ID NO:1036, SEQ ID NO:1037, SEQ ID NO:1038, SEQ ID NO:1039, SEQ ID NO:1040, SEQ ID NO:1041, SEQ ID NO:1042, SEQ ID NO:1043, SEQ ID NO:1044, SEQ ID NO:1045, SEQ ID NO:1046, SEQ ID NO:1047, SEQ ID NO:1048, SEQ ID NO:1049, SEQ ID NO:1050, SEQ ID NO:1051, SEQ ID NO:1052, SEQ ID NO:1053, SEQ ID NO:1054, SEQ ID NO:1055, SEQ ID NO:1056, SEQ ID NO:1057, SEQ ID NO:1058, SEQ ID NO:1059, SEQ ID NO:1060, SEQ ID NO:1061, SEQ ID NO:1062, SEQ ID NO:1063, SEQ ID NO:1064, SEQ ID NO:1065, SEQ ID NO:1066, SEQ ID NO:1067, SEQ ID NO:1068, SEQ ID NO:1069, SEQ ID NO:1070, SEQ ID NO:1071, SEQ ID NO:1072, SEQ ID NO:1073, SEQ ID NO:1074, SEQ ID NO:1075, SEQ ID NO:1076, SEQ ID NO:1077, SEQ ID NO:1078, SEQ ID NO:1079, SEQ ID NO:1080, SEQ ID NO:1081, SEQ ID NO:1082, SEQ ID NO:1083, SEQ ID NO:1084, SEQ ID NO:1085, SEQ ID NO:1086, SEQ ID NO:1087, SEQ ID NO:1088, SEQ ID NO:1089, SEQ ID NO:1090, SEQ ID NO:1091, SEQ ID NO:1092, SEQ ID NO:1093, SEQ ID NO:1094, SEQ ID NO:1095, SEQ ID NO:1096, SEQ ID NO:1097, SEQ ID NO:1098, SEQ ID NO:1099, SEQ ID NO:1100, SEQ ID NO:1101, SEQ ID NO:1102, SEQ ID NO:1103, SEQ ID NO:1104, SEQ ID NO:1105, SEQ ID NO:1106, SEQ ID NO:1107, SEQ ID NO:1108, SEQ ID NO:1109, SEQ ID NO:1110, SEQ ID NO:1111, SEQ ID NO:1112, SEQ ID NO:1113, SEQ ID NO:1114, SEQ ID NO:1115, SEQ ID NO:1116, SEQ ID NO:1117, SEQ ID NO:1118, SEQ ID NO:1119, SEQ ID NO:1120, SEQ ID NO:1121, SEQ ID NO:1122, SEQ ID NO:1123, SEQ ID NO:1124, SEQ ID NO:1125, SEQ ID NO:1126, SEQ ID NO:1127, SEQ ID NO:1128, SEQ ID NO:1129, SEQ ID NO:1130, SEQ ID NO:1131, SEQ ID NO:1132, SEQ ID NO:1133, SEQ ID NO:1134, SEQ ID NO:1135, SEQ ID NO:1136, SEQ ID NO:1137, SEQ ID NO:1138, SEQ ID NO:1139, SEQ ID NO:1140, SEQ ID NO:1141, SEQ ID NO:1142, SEQ ID NO:1143, SEQ ID NO:1144, SEQ ID NO:1145, SEQ ID NO:1146, SEQ ID NO:1147, SEQ ID NO:1148, SEQ ID NO:1149, SEQ ID NO:1150, SEQ ID NO:1151, SEQ ID NO:1152, SEQ ID NO:1153, SEQ ID NO:1154, SEQ ID NO:1155, SEQ ID NO:1156, SEQ ID NO:1157, SEQ ID NO:1158, SEQ ID NO:1159, SEQ ID NO:1160, SEQ ID NO:1161, SEQ ID NO:1162, SEQ ID NO:1163, SEQ ID NO:1164, SEQ ID NO:1165, SEQ ID NO:1166, SEQ ID NO:1167, SEQ ID NO:1168, SEQ ID NO:1169, SEQ ID NO:1170, SEQ ID NO:1171, SEQ ID NO:1172, SEQ ID NO:1173, SEQ ID NO:1174, SEQ ID NO:1175, SEQ ID NO:1176, SEQ ID NO:1177, SEQ ID NO:1178, SEQ ID NO:1179, SEQ ID NO:1180, SEQ ID NO:1181, SEQ ID NO:1182, SEQ ID NO:1183, SEQ ID NO:1184, SEQ ID NO:1185, SEQ ID NO:1186, SEQ ID NO:1187, SEQ ID NO:1188, SEQ ID NO:1189, SEQ ID NO:1190, SEQ ID NO:1191, SEQ ID NO:1192, SEQ ID NO:1193, SEQ ID NO:1194, SEQ ID NO:1195, SEQ ID NO:1196, SEQ ID NO:1197, SEQ ID NO:1198, SEQ ID NO:1199, SEQ ID NO:1200, SEQ ID NO:1201, SEQ ID NO:1202, SEQ ID NO:1203, SEQ ID NO:1204, SEQ ID NO:1205, SEQ ID NO:1206, SEQ ID NO:1207, SEQ ID NO:1208, SEQ ID NO:1209, SEQ ID NO:1210, SEQ ID NO:1211, SEQ ID NO:1212, SEQ ID NO:1213, SEQ ID NO:1214, SEQ ID NO:1215, SEQ ID NO:1216, SEQ ID NO:1217, SEQ ID NO:1218, SEQ ID NO:1219, SEQ ID NO:1220, SEQ ID NO:1221, SEQ ID NO:1222, SEQ ID NO:1223, SEQ ID NO:1224, SEQ ID NO:1225, SEQ ID NO:1226, SEQ ID NO:1227, SEQ ID NO:1228, SEQ ID NO:1229, SEQ ID NO:1230, SEQ ID NO:1231, SEQ ID NO:1232, SEQ ID NO:1233, SEQ ID NO:1234, SEQ ID NO:1235, SEQ ID NO:1236, SEQ ID NO:1237, SEQ ID NO:1238, SEQ ID NO:1239, SEQ ID NO:1240, SEQ ID NO:1241, SEQ ID NO:1242, SEQ ID NO:1243, SEQ ID NO:1244, SEQ ID NO:1245, SEQ ID NO:1246, SEQ ID NO:1247, SEQ ID NO:1248, SEQ ID NO:1249, SEQ ID NO:1250, SEQ ID NO:1251, SEQ ID NO:1252, SEQ ID NO:1253, SEQ ID NO:1254, SEQ ID NO:1255, SEQ ID NO:1256, SEQ ID NO:1257, SEQ ID NO:1258, SEQ ID NO:1259, SEQ ID NO:1260, SEQ ID NO:1261, SEQ ID NO:1262, SEQ ID NO:1263, SEQ ID NO:1264, SEQ ID NO:1265, SEQ ID NO:1266, SEQ ID NO:1267, SEQ ID NO:1268, SEQ ID NO:1269, SEQ ID NO:1270, SEQ ID NO:1271, SEQ ID NO:1272, SEQ ID NO:1273, SEQ ID NO:1274, SEQ ID NO:1275, SEQ ID NO:1276, SEQ ID NO:1277, SEQ ID NO:1278, SEQ ID NO:1279, SEQ ID NO:1280, SEQ ID NO:1281, SEQ ID NO:1282, SEQ ID NO:1283, SEQ ID NO:1284, SEQ ID NO:1285, SEQ ID NO:1286, SEQ ID NO:1287, SEQ ID NO:1288, SEQ ID NO:1289, SEQ ID NO:1290, SEQ ID NO:1291, SEQ ID NO:1292, SEQ ID NO:1293, SEQ ID NO:1294, SEQ ID NO:1295, SEQ ID NO:1296, SEQ ID NO:1297, SEQ ID NO:1298, SEQ ID NO:1299, SEQ ID NO:1300, SEQ ID NO:1301, SEQ ID NO:1302, SEQ ID NO:1303, SEQ ID NO:1304, SEQ ID NO:1305, SEQ ID NO:1306, SEQ ID NO:1307, SEQ ID NO:1308, SEQ ID NO:1309, SEQ ID NO:1310, SEQ ID NO:1311, SEQ ID NO:1312, SEQ ID NO:1313, SEQ ID NO:1314, SEQ ID NO:1315, SEQ ID NO:1316, SEQ ID NO:1317, SEQ ID NO:1318, SEQ ID NO:1319, SEQ ID NO:1320, SEQ ID NO:1321, SEQ ID NO:1322, SEQ ID NO:1323, SEQ ID NO:1324, SEQ ID NO:1325, SEQ ID NO:1326, SEQ ID NO:1327, SEQ ID NO:1328, SEQ ID NO:1329, SEQ ID NO:1330, SEQ ID NO:1331, SEQ ID NO:1332, SEQ ID NO:1333, SEQ ID NO:1334, SEQ ID NO:1335, SEQ ID NO:1336, SEQ ID NO:1337, SEQ ID NO:1338, SEQ ID NO:1339, SEQ ID NO:1340, SEQ ID NO:1341, SEQ ID NO:1342, SEQ ID NO:1343, SEQ ID NO:1344, SEQ ID NO:1345, SEQ ID NO:1346, SEQ ID NO:1347, SEQ ID NO:1348, SEQ ID NO:1349, SEQ ID NO:1350, SEQ ID NO:1351, SEQ ID NO:1352, SEQ ID NO:1353, SEQ ID NO:1354, SEQ ID NO:1355, SEQ ID NO:1356, SEQ ID NO:1357, SEQ ID NO:1358, SEQ ID NO:1359, SEQ ID NO:1360, SEQ ID NO:1361, SEQ ID NO:1362, SEQ ID NO:1363, SEQ ID NO:1364, SEQ ID NO:1365, SEQ ID NO:1366, SEQ ID NO:1367, SEQ ID NO:1368, SEQ ID NO:1369, SEQ ID NO:1370, SEQ ID NO:1371, SEQ ID NO:1372, SEQ ID NO:1373, SEQ ID NO:1374, SEQ ID NO:1375, SEQ ID NO:1376, SEQ ID NO:1377, SEQ ID NO:1378, SEQ ID NO:1379, SEQ ID NO:1380, SEQ ID NO:1381, SEQ ID NO:1382, SEQ ID NO:1383, SEQ ID NO:1384, SEQ ID NO:1385, SEQ ID NO:1386, SEQ ID NO:1387, SEQ ID NO:1388, SEQ ID NO:1389, SEQ ID NO:1390, SEQ ID NO:1391, SEQ ID NO:1392, SEQ ID NO:1393, SEQ ID NO:1394, SEQ ID NO:1395, SEQ ID NO:1396, SEQ ID NO:1397, SEQ ID NO:1398, SEQ ID NO:1399, SEQ ID NO:1400, SEQ ID NO:1401, SEQ ID NO:1402, SEQ ID NO:1403, SEQ ID NO:1404, SEQ ID NO:1405, SEQ ID NO:1406, SEQ ID NO:1407, SEQ ID NO:1408, SEQ ID NO:1409, SEQ ID NO:1410, SEQ ID NO:1411, SEQ ID NO:1412, SEQ ID NO:1413, SEQ ID NO:1414, SEQ ID NO:1415, SEQ ID NO:1416, SEQ ID NO:1417, SEQ ID NO:1418, SEQ ID NO:1419, SEQ ID NO:1420, SEQ ID NO:1421, SEQ ID NO:1422, SEQ ID NO:1423, SEQ ID NO:1424, SEQ ID NO:1425, SEQ ID NO:1426, SEQ ID NO:1427, SEQ ID NO:1428, SEQ ID NO:1429, SEQ ID NO:1430, SEQ ID NO:1431, SEQ ID NO:1432, SEQ ID NO:1433, SEQ ID NO:1434, SEQ ID NO:1435, SEQ ID NO:1436, SEQ ID NO:1437, SEQ ID NO:1438, SEQ ID NO:1439, SEQ ID NO:1440, SEQ ID NO:1441, SEQ ID NO:1442, SEQ ID NO:1443, SEQ ID NO:1444, SEQ ID NO:1445, SEQ ID NO:1446, SEQ ID NO:1447, SEQ ID NO:1448, SEQ ID NO:1449, SEQ ID NO:1450, SEQ ID NO:1451, SEQ ID NO:1452, SEQ ID NO:1453, SEQ ID NO:1454, SEQ ID NO:1455, SEQ ID NO:1456, SEQ ID NO:1457, SEQ ID NO:1458, SEQ ID NO:1459, SEQ ID NO:1460, SEQ ID NO:1461, SEQ ID NO:1462, SEQ ID NO:1463, SEQ ID NO:1464, SEQ ID NO:1465, SEQ ID NO:1466, SEQ ID NO:1467, SEQ ID NO:1468, SEQ ID NO:1469, SEQ ID NO:1470, SEQ ID NO:1471, SEQ ID NO:1472, SEQ ID NO:1473, SEQ ID NO:1474, SEQ ID NO:1475, SEQ ID NO:1476, SEQ ID NO:1477, SEQ ID NO:1478, SEQ ID NO:1479, SEQ ID NO:1480, SEQ ID NO:1481, SEQ ID NO:1482, SEQ ID NO:1483, SEQ ID NO:1484, SEQ ID NO:1485, SEQ ID NO:1486, SEQ ID NO:1487, SEQ ID NO:1488, SEQ ID NO:1489, SEQ ID NO:1490, SEQ ID NO:1491, SEQ ID NO:1492, SEQ ID NO:1493, SEQ ID NO:1494, SEQ ID NO:1495, SEQ ID NO:1496, SEQ ID NO:1497, SEQ ID NO:1498, SEQ ID NO:1499, SEQ ID NO:1500, SEQ ID NO:1501, SEQ ID NO:1502, SEQ ID NO:1503, SEQ ID NO:1504, SEQ ID NO:1505, SEQ ID NO:1506, SEQ ID NO:1507, SEQ ID NO:1508, SEQ ID NO:1509, SEQ ID NO:1510, SEQ ID NO:1511, SEQ ID NO:1512, SEQ ID NO:1513, SEQ ID NO:1514, SEQ ID NO:1515, SEQ ID NO:1516, SEQ ID NO:1517, SEQ ID NO:1518, and SEQ ID NO:1519;
or a complement of said sequence.

2. An isolated polynucleotide consisting of a nucleotide sequence selected from the group consisting of:
SEQ ID NO:1, SEQ ID NO:2, SEQ ID NO:3, SEQ ID NO:4, SEQ ID NO:5, SEQ ID NO:6, SEQ ID NO:7, SEQ ID NO:8, SEQ ID NO:9, SEQ ID NO:10, SEQ ID NO:11, SEQ ID NO:12, SEQ ID NO:13, SEQ ID NO:14, SEQ ID NO:15, SEQ ID NO:16, SEQ ID NO:17, SEQ ID NO:18, SEQ ID NO:19, SEQ ID NO:20, SEQ ID NO:21, SEQ ID NO:22, SEQ ID NO:23, SEQ ID NO:24, SEQ ID NO:25, SEQ ID NO:26, SEQ ID NO:27, SEQ ID NO:28, SEQ ID NO:29, SEQ ID NO:30, SEQ ID NO:31, SEQ ID NO:32, SEQ ID NO:33, SEQ ID NO:34, SEQ ID NO:35, SEQ ID NO:36, SEQ ID NO:37, SEQ ID NO:38, SEQ ID NO:39, SEQ ID NO:40, SEQ ID NO:41, SEQ ID NO:42, SEQ ID NO:43, SEQ ID NO:44, SEQ ID NO:45, SEQ ID NO:46, SEQ ID NO:47, SEQ ID NO:48, SEQ ID NO:49, SEQ ID NO:50, SEQ ID NO:51, SEQ ID NO:52, SEQ ID NO:53, SEQ ID NO:54, SEQ ID NO:55, SEQ ID NO:56, SEQ ID NO:57, SEQ ID NO:58, SEQ ID NO:59, SEQ ID NO:60, SEQ ID NO:61, SEQ ID NO:62, SEQ ID NO:63, SEQ ID NO:64, SEQ ID NO:65, SEQ ID NO:66, SEQ ID NO:67, SEQ ID NO:68, SEQ ID NO:69, SEQ ID NO:70, SEQ ID NO:71, SEQ ID NO:72, SEQ ID NO:73, SEQ ID NO:74, SEQ ID NO:75, SEQ ID NO:76, SEQ ID NO:77, SEQ ID NO:78, SEQ ID NO:79, SEQ ID NO:80, SEQ ID NO:81, SEQ ID NO:82, SEQ ID NO:83, SEQ ID NO:84, SEQ ID NO:85, SEQ ID NO:86, SEQ ID NO:87, SEQ ID NO:88, SEQ ID NO:89, SEQ ID NO:90, SEQ ID NO:91, SEQ ID NO:92, SEQ ID NO:93, SEQ ID NO:94, SEQ ID NO:95, SEQ ID NO:96, SEQ ID NO:97, SEQ ID NO:98, SEQ ID NO:99, SEQ ID NO:100, SEQ ID NO:101, SEQ ID NO:102, SEQ ID NO:103, SEQ ID NO:104, SEQ ID NO:105, SEQ ID NO:106, SEQ ID NO:107, SEQ ID NO:108, SEQ ID NO:109, SEQ ID NO:110, SEQ ID NO:111, SEQ ID NO:112, SEQ ID NO:113, SEQ ID NO:114, SEQ ID NO:115, SEQ ID NO:116, SEQ ID NO:117, SEQ ID NO:118, SEQ ID NO:119, SEQ ID NO:120, SEQ ID NO:121, SEQ ID NO:122, SEQ ID NO:123, SEQ ID NO:124, SEQ ID NO:125, SEQ ID NO:126, SEQ ID NO:127, SEQ ID NO:128, SEQ ID NO:129, SEQ ID NO:130, SEQ ID NO:131, SEQ ID NO:132, SEQ ID NO:133, SEQ ID NO:134, SEQ ID NO:135, SEQ ID NO:136, SEQ ID NO:137, SEQ ID NO:138, SEQ ID NO:139, SEQ ID NO:140, SEQ ID NO:141, SEQ ID NO:142, SEQ ID NO:143, SEQ ID NO:144, SEQ ID NO:145, SEQ ID NO:146, SEQ ID NO:147, SEQ ID NO:148, SEQ ID NO:149, SEQ ID NO:150, SEQ ID NO:151, SEQ ID NO:152, SEQ ID NO:153, SEQ ID NO:154, SEQ ID NO:155, SEQ ID NO:156, SEQ ID NO:157, SEQ ID NO:158, SEQ ID NO:159, SEQ ID NO:160, SEQ ID NO:161, SEQ ID NO:162, SEQ ID NO:163, SEQ ID NO:164, SEQ ID NO:165, SEQ ID NO:166, SEQ ID NO:167, SEQ ID NO:168, SEQ ID NO:169, SEQ ID NO:170, SEQ ID NO:171, SEQ ID NO:172, SEQ ID NO:173, SEQ ID NO:174, SEQ ID NO:175, SEQ ID NO:176, SEQ ID NO:177, SEQ ID NO:178, SEQ ID NO:179, SEQ ID NO:180, SEQ ID NO:181, SEQ ID NO:182, SEQ ID NO:183, SEQ ID NO:184, SEQ ID NO:185, SEQ ID NO:186, SEQ ID NO:187, SEQ ID NO:188, SEQ ID NO:189, SEQ ID NO:190, SEQ ID NO:191, SEQ ID NO:192, SEQ ID NO:193, SEQ ID NO:194, SEQ ID NO:195, SEQ ID NO:196, SEQ ID NO:197, SEQ ID NO:198, SEQ ID NO:199, SEQ ID NO:200, SEQ ID NO:201, SEQ ID NO:202, SEQ ID NO:203, SEQ ID NO:204, SEQ ID NO:205, SEQ ID NO:206, SEQ ID NO:207, SEQ ID NO:208, SEQ ID NO:209, SEQ ID NO:210, SEQ ID NO:211, SEQ ID NO:212, SEQ ID NO:213, SEQ ID NO:214, SEQ ID NO:215, SEQ ID NO:216, SEQ ID NO:217, SEQ ID NO:218, SEQ ID NO:219, SEQ ID NO:220, SEQ ID NO:221, SEQ ID NO:222, SEQ ID NO:223, SEQ ID NO:224, SEQ ID NO:225, SEQ ID NO:226, SEQ ID NO:227, SEQ ID NO:228, SEQ ID NO:229, SEQ ID NO:230, SEQ ID NO:231, SEQ ID NO:232, SEQ ID NO:233, SEQ ID NO:234, SEQ ID NO:235, SEQ ID NO:236, SEQ ID NO:237, SEQ ID NO:238, SEQ ID NO:239, SEQ ID NO:240, SEQ ID NO:241, SEQ ID NO:242, SEQ ID NO:243, SEQ ID NO:244, SEQ ID NO:245, SEQ ID NO:246, SEQ ID NO:247, SEQ ID NO:248, SEQ ID NO:249, SEQ ID NO:250, SEQ ID NO:251, SEQ ID NO:252, SEQ ID NO:253, SEQ ID NO:254, SEQ ID NO:255, SEQ ID NO:256, SEQ ID NO:257, SEQ ID NO:258, SEQ ID NO:259, SEQ ID NO:260, SEQ ID NO:261, SEQ ID NO:262, SEQ ID NO:263, SEQ ID NO:264, SEQ ID NO:265, SEQ ID NO:266, SEQ ID NO:267, SEQ ID NO:268, SEQ ID NO:269, SEQ ID NO:270, SEQ ID NO:271, SEQ ID NO:272, SEQ ID NO:273, SEQ ID NO:274, SEQ ID NO:275, SEQ ID NO:276, SEQ ID NO:277, SEQ ID NO:278, SEQ ID NO:279, SEQ ID NO:280, SEQ ID NO:281, SEQ ID NO:282, SEQ ID NO:283, SEQ ID NO:284, SEQ ID NO:285, SEQ ID NO:286, SEQ ID NO:287, SEQ ID NO:288, SEQ ID NO:289, SEQ ID NO:290, SEQ ID NO:291, SEQ ID NO:292, SEQ ID NO:293, SEQ ID NO:294, SEQ ID NO:295, SEQ ID NO:296, SEQ ID NO:297, SEQ ID NO:298, SEQ ID NO:299, SEQ ID NO:300, SEQ ID NO:301, SEQ ID NO:302, SEQ ID NO:303, SEQ ID NO:304, SEQ ID NO:305, SEQ ID NO:306, SEQ ID NO:307, SEQ ID NO:308, SEQ ID NO:309, SEQ ID NO:310, SEQ ID NO:311, SEQ ID NO:312, SEQ ID NO:313, SEQ ID NO:314, SEQ ID NO:315, SEQ ID NO:316, SEQ ID NO:317, SEQ ID NO:318, SEQ ID NO:319, SEQ ID NO:320, SEQ ID NO:321, SEQ ID NO:322, SEQ ID NO:323, SEQ ID NO:324, SEQ ID NO:325, SEQ ID NO:326, SEQ ID NO:327, SEQ ID NO:328, SEQ ID NO:329, SEQ ID NO:330, SEQ ID NO:331, SEQ ID NO:332, SEQ ID NO:333, SEQ ID NO:334, SEQ ID NO:335, SEQ ID NO:336, SEQ ID NO:337, SEQ ID NO:338, SEQ ID NO:339, SEQ ID NO:340, SEQ ID NO:341, SEQ ID NO:342, SEQ ID NO:343, SEQ ID NO:344, SEQ ID NO:345, SEQ ID NO:346, SEQ ID NO:347, SEQ ID NO:348, SEQ ID NO:349, SEQ ID NO:350, SEQ ID NO:351, SEQ ID NO:352, SEQ ID NO:353, SEQ ID NO:354, SEQ ID NO:355, SEQ ID NO:356, SEQ ID NO:357, SEQ ID NO:358, SEQ ID NO:359, SEQ ID NO:360, SEQ ID NO:361, SEQ ID NO:362, SEQ ID NO:363, SEQ ID NO:364, SEQ ID NO:365, SEQ ID NO:366, SEQ ID NO:367, SEQ ID NO:368, SEQ ID NO:369, SEQ ID NO:370, SEQ ID NO:371, SEQ ID NO:372, SEQ ID NO:373, SEQ ID NO:374, SEQ ID NO:375, SEQ ID NO:376, SEQ ID NO:377, SEQ ID NO:378, SEQ ID NO:379, SEQ ID NO:380, SEQ ID NO:381, SEQ ID NO:382, SEQ ID NO:383, SEQ ID NO:384, SEQ ID NO:385, SEQ ID NO:386, SEQ ID NO:387, SEQ ID NO:388, SEQ ID NO:389, SEQ ID NO:390, SEQ ID NO:391, SEQ ID NO:392, SEQ ID NO:393, SEQ ID NO:394, SEQ ID NO:395, SEQ ID NO:396, SEQ ID NO:397, SEQ ID NO:398, SEQ ID NO:399, SEQ ID NO:400, SEQ ID NO:401, SEQ ID NO:402, SEQ ID NO:403, SEQ ID NO:404, SEQ ID NO:405, SEQ ID NO:406, SEQ ID NO:407, SEQ ID NO:408, SEQ ID NO:409, SEQ ID NO:410, SEQ ID NO:411, SEQ ID NO:412, SEQ ID NO:413, SEQ ID NO:414, SEQ ID NO:415, SEQ ID NO:416, SEQ ID NO:417, SEQ ID NO:418, SEQ ID NO:419, SEQ ID NO:420, SEQ ID NO:421, SEQ ID NO:422, SEQ ID NO:423, SEQ ID NO:424, SEQ ID NO:425, SEQ ID NO:426, SEQ ID NO:427, SEQ ID NO:428, SEQ ID NO:429, SEQ ID NO:430, SEQ ID NO:431, SEQ ID NO:432, SEQ ID NO:433, SEQ ID NO:434, SEQ ID NO:435, SEQ ID NO:436, SEQ ID NO:437, SEQ ID NO:438, SEQ ID NO:439, SEQ ID NO:440, SEQ ID NO:441, SEQ ID NO:442, SEQ ID NO:443, SEQ ID NO:444, SEQ ID NO:445, SEQ ID NO:446, SEQ ID NO:447, SEQ ID NO:448, SEQ ID NO:449, SEQ ID NO:450, SEQ ID NO:451, SEQ ID NO:452, SEQ ID NO:453, SEQ ID NO:454, SEQ ID NO:455, SEQ ID NO:456, SEQ ID NO:457, SEQ ID NO:458, SEQ ID NO:459, SEQ ID NO:460, SEQ ID NO:461, SEQ ID NO:462, SEQ ID NO:463, SEQ ID NO:464, SEQ ID NO:465, SEQ ID NO:466, SEQ ID NO:467, SEQ ID NO:468, SEQ ID NO:469, SEQ ID NO:470, SEQ ID NO:471, SEQ ID NO:472, SEQ ID NO:473, SEQ ID NO:474, SEQ ID NO:475, SEQ ID NO:476, SEQ ID NO:477, SEQ ID NO:478, SEQ ID NO:479, SEQ ID NO:480, SEQ ID NO:481, SEQ ID NO:482, SEQ ID NO:483, SEQ ID NO:484, SEQ ID NO:485, SEQ ID NO:486, SEQ ID NO:487, SEQ ID NO:488, SEQ ID NO:489, SEQ ID NO:490, SEQ ID NO:491, SEQ ID NO:492, SEQ ID NO:493, SEQ ID NO:494, SEQ ID NO:495, SEQ ID NO:496, SEQ ID NO:497, SEQ ID NO:498, SEQ ID NO:499, SEQ ID NO:500, SEQ ID NO:501, SEQ ID NO:502, SEQ ID NO:503, SEQ ID NO:504, SEQ ID NO:505, SEQ ID NO:506, SEQ ID NO:507, SEQ ID NO:508, SEQ ID NO:509, SEQ ID NO:510, SEQ ID NO:511, SEQ ID NO:512, SEQ ID NO:513, SEQ ID NO:514, SEQ ID NO:515, SEQ ID NO:516, SEQ ID NO:517, SEQ ID NO:518, SEQ ID NO:519, SEQ ID NO:520, SEQ ID NO:521, SEQ ID NO:522, SEQ ID NO:523, SEQ ID NO:524, SEQ ID NO:525, SEQ ID NO:526, SEQ ID NO:527, SEQ ID NO:528, SEQ ID NO:529, SEQ ID NO:530, SEQ ID NO:531, SEQ ID NO:532, SEQ ID NO:533, SEQ ID NO:534, SEQ ID NO:535, SEQ ID NO:536, SEQ ID NO:537, SEQ ID NO:538, SEQ ID NO:539, SEQ ID NO:540, SEQ ID NO:541, SEQ ID NO:542, SEQ ID NO:543, SEQ ID NO:544, SEQ ID NO:545, SEQ ID NO:546, SEQ ID NO:547, SEQ ID NO:548, SEQ ID NO:549, SEQ ID NO:550, SEQ ID NO:551, SEQ ID NO:552, SEQ ID NO:553, SEQ ID NO:554, SEQ ID NO:555, SEQ ID NO:556, SEQ ID NO:557, SEQ ID NO:558, SEQ ID NO:559, SEQ ID NO:560, SEQ ID NO:561, SEQ ID NO:562, SEQ ID NO:563, SEQ ID NO:564, SEQ ID NO:565, SEQ ID NO:566, SEQ ID NO:567, SEQ ID NO:568, SEQ ID NO:569, SEQ ID NO:570, SEQ ID NO:571, SEQ ID NO:572, SEQ ID NO:573, SEQ ID NO:574, SEQ ID NO:575, SEQ ID NO:576, SEQ ID NO:577, SEQ ID NO:578, SEQ ID NO:579, SEQ ID NO:580, SEQ ID NO:581, SEQ ID NO:582, SEQ ID NO:583, SEQ ID NO:584, SEQ ID NO:585, SEQ ID NO:586, SEQ ID NO:587, SEQ ID NO:588, SEQ ID NO:589, SEQ ID NO:590, SEQ ID NO:591, SEQ ID NO:592, SEQ ID NO:593, SEQ ID NO:594, SEQ ID NO:595, SEQ ID NO:596, SEQ ID NO:597, SEQ ID NO:598, SEQ ID NO:599, SEQ ID NO:600, SEQ ID NO:601, SEQ ID NO:602, SEQ ID NO:603, SEQ ID NO:604, SEQ ID NO:605, SEQ ID NO:606, SEQ ID NO:607, SEQ ID NO:608, SEQ ID NO:609, SEQ ID NO:610, SEQ ID NO:611, SEQ ID NO:612, SEQ ID NO:613, SEQ ID NO:614, SEQ ID NO:615, SEQ ID NO:616, SEQ ID NO:617, SEQ ID NO:618, SEQ ID NO:619, SEQ ID NO:620, SEQ ID NO:621, SEQ ID NO:622, SEQ ID NO:623, SEQ ID NO:624, SEQ ID NO:625, SEQ ID NO:626, SEQ ID NO:627, SEQ ID NO:628, SEQ ID NO:629, SEQ ID NO:630, SEQ ID NO:631, SEQ ID NO:632, SEQ ID NO:633, SEQ ID NO:634, SEQ ID NO:635, SEQ ID NO:636, SEQ ID NO:637, SEQ ID NO:638, SEQ ID NO:639, SEQ ID NO:640, SEQ ID NO:641, SEQ ID NO:642, SEQ ID NO:643, SEQ ID NO:644, SEQ ID NO:645, SEQ ID NO:646, SEQ ID NO:647, SEQ ID NO:648, SEQ ID NO:649, SEQ ID NO:650, SEQ ID NO:651, SEQ ID NO:652, SEQ ID NO:653, SEQ ID NO:654, SEQ ID NO:655, SEQ ID NO:656, SEQ ID NO:657, SEQ ID NO:658, SEQ ID NO:659, SEQ ID NO:660, SEQ ID NO:661, SEQ ID NO:662, SEQ ID NO:663, SEQ ID NO:664, SEQ ID NO:665, SEQ ID NO:666, SEQ ID NO:667, SEQ ID NO:668, SEQ ID NO:669, SEQ ID NO:670, SEQ ID NO:671, SEQ ID NO:672, SEQ ID NO:673, SEQ ID NO:674, SEQ ID NO:675, SEQ ID NO:676, SEQ ID NO:677, SEQ ID NO:678, SEQ ID NO:679, SEQ ID NO:680, SEQ ID NO:681, SEQ ID NO:682, SEQ ID NO:683, SEQ ID NO:684, SEQ ID NO:685, SEQ ID NO:686, SEQ ID NO:687, SEQ ID NO:688, SEQ ID NO:689, SEQ ID NO:690, SEQ ID NO:691, SEQ ID NO:692, SEQ ID NO:693, SEQ ID NO:694, SEQ ID NO:695, SEQ ID NO:696, SEQ ID NO:697, SEQ ID NO:698, SEQ ID NO:699, SEQ ID NO:700, SEQ ID NO:701, SEQ ID NO:702, SEQ ID NO:703, SEQ ID NO:704, SEQ ID NO:705, SEQ ID NO:706, SEQ ID NO:707, SEQ ID NO:708, SEQ ID NO:709, SEQ ID NO:710, SEQ ID NO:711, SEQ ID NO:712, SEQ ID NO:713, SEQ ID NO:714, SEQ ID NO:715, SEQ ID NO:716, SEQ ID NO:717, SEQ ID NO:718, SEQ ID NO:719, SEQ ID NO:720, SEQ ID NO:721, SEQ ID NO:722, SEQ ID NO:723, SEQ ID NO:724, SEQ ID NO:725, SEQ ID NO:726, SEQ ID NO:727, SEQ ID NO:728, SEQ ID NO:729, SEQ ID NO:730, SEQ ID NO:731, SEQ ID NO:732, SEQ ID NO:733, SEQ ID NO:734, SEQ ID NO:735, SEQ ID NO:736, SEQ ID NO:737, SEQ ID NO:738, SEQ ID NO:739, SEQ ID NO:740, SEQ ID NO:741, SEQ ID NO:742, SEQ ID NO:743, SEQ ID NO:744, SEQ ID NO:745, SEQ ID NO:746, SEQ ID NO:747, SEQ ID NO:748, SEQ ID NO:749, SEQ ID NO:750, SEQ ID NO:751, SEQ ID NO:752, SEQ ID NO:753, SEQ ID NO:754, SEQ ID NO:755, SEQ ID NO:756, SEQ ID NO:757, SEQ ID NO:758, SEQ ID NO:759, SEQ ID NO:760, SEQ ID NO:761, SEQ ID NO:762, SEQ ID NO:763, SEQ ID NO:764, SEQ ID NO:765, SEQ ID NO:766, SEQ ID NO:767, SEQ ID NO:768, SEQ ID NO:769, SEQ ID NO:770, SEQ ID NO:771, SEQ ID NO:772, SEQ ID NO:773, SEQ ID NO:774, SEQ ID NO:775, SEQ ID NO:776, SEQ ID NO:777, SEQ ID NO:778, SEQ ID NO:779, SEQ ID NO:780, SEQ ID NO:781, SEQ ID NO:782, SEQ ID NO:783, SEQ ID NO:784, SEQ ID NO:785, SEQ ID NO:786, SEQ ID NO:787, SEQ ID NO:788, SEQ ID NO:789, SEQ ID NO:790, SEQ ID NO:791, SEQ ID NO:792, SEQ ID NO:793, SEQ ID NO:794, SEQ ID NO:795, SEQ ID NO:796, SEQ ID NO:797, SEQ ID NO:798, SEQ ID NO:799, SEQ ID NO:800, SEQ ID NO:801, SEQ ID NO:802, SEQ ID NO:803, SEQ ID NO:804, SEQ ID NO:805, SEQ ID NO:806, SEQ ID NO:807, SEQ ID NO:808, SEQ ID NO:809, SEQ ID NO:810, SEQ ID NO:811, SEQ ID NO:812, SEQ ID NO:813, SEQ ID NO:814, SEQ ID NO:815, SEQ ID NO:816, SEQ ID NO:817, SEQ ID NO:818, SEQ ID NO:819, SEQ ID NO:820, SEQ ID NO:821, SEQ ID NO:822, SEQ ID NO:823, SEQ ID NO:824, SEQ ID NO:825, SEQ ID NO:826, SEQ ID NO:827, SEQ ID NO:828, SEQ ID NO:829, SEQ ID NO:830, SEQ ID NO:831, SEQ ID NO:832, SEQ ID NO:833, SEQ ID NO:834, SEQ ID NO:835, SEQ ID NO:836, SEQ ID NO:837, SEQ ID NO:838, SEQ ID NO:839, SEQ ID NO:840, SEQ ID NO:841, SEQ ID NO:842, SEQ ID NO:843, SEQ ID NO:844, SEQ ID NO:845, SEQ ID NO:846, SEQ ID NO:847, SEQ ID NO:848, SEQ ID NO:849, SEQ ID NO:850, SEQ ID NO:851, SEQ ID NO:852, SEQ ID NO:853, SEQ ID NO:854, SEQ ID NO:855, SEQ ID NO:856, SEQ ID NO:857, SEQ ID NO:858, SEQ ID NO:859, SEQ ID NO:860, SEQ ID NO:861, SEQ ID NO:862, SEQ ID NO:863, SEQ ID NO:864, SEQ ID NO:865, SEQ ID NO:866, SEQ ID NO:867, SEQ ID NO:868, SEQ ID NO:869, SEQ ID NO:870, SEQ ID NO:871, SEQ ID NO:872, SEQ ID NO:873, SEQ ID NO:874, SEQ ID NO:875, SEQ ID NO:876, SEQ ID NO:877, SEQ ID NO:878, SEQ ID NO:879, SEQ ID NO:880, SEQ ID NO:881, SEQ ID NO:882, SEQ ID NO:883, SEQ ID NO:884, SEQ ID NO:885, SEQ ID NO:886, SEQ ID NO:887, SEQ ID NO:888, SEQ ID NO:889, SEQ ID NO:890, SEQ ID NO:891, SEQ ID NO:892, SEQ ID NO:893, SEQ ID NO:894, SEQ ID NO:895, SEQ ID NO:896, SEQ ID NO:897, SEQ ID NO:898, SEQ ID NO:899, SEQ ID NO:900, SEQ ID NO:901, SEQ ID NO:902, SEQ ID NO:903, SEQ ID NO:904, SEQ ID NO:905, SEQ ID NO:906, SEQ ID NO:907, SEQ ID NO:908, SEQ ID NO:909, SEQ ID NO:910, SEQ ID NO:911, SEQ ID NO:912, SEQ ID NO:913, SEQ ID NO:914, SEQ ID NO:915, SEQ ID NO:916, SEQ ID NO:917, SEQ ID NO:918, SEQ ID NO:919, SEQ ID NO:920, SEQ ID NO:921, SEQ ID NO:922, SEQ ID NO:923, SEQ ID NO:924, SEQ ID NO:925, SEQ ID NO:926, SEQ ID NO:927, SEQ ID NO:928, SEQ ID NO:929, SEQ ID NO:930, SEQ ID NO:931, SEQ ID NO:932, SEQ ID NO:933, SEQ ID NO:934, SEQ ID NO:935, SEQ ID NO:936, SEQ ID NO:937, SEQ ID NO:938, SEQ ID NO:939, SEQ ID NO:940, SEQ ID NO:941, SEQ ID NO:942, SEQ ID NO:943, SEQ ID NO:944, SEQ ID NO:945, SEQ ID NO:946, SEQ ID NO:947, SEQ ID NO:948, SEQ ID NO:949, SEQ ID NO:950, SEQ ID NO:951, SEQ ID NO:952, SEQ ID NO:953, SEQ ID NO:954, SEQ ID NO:955, SEQ ID NO:956, SEQ ID NO:957, SEQ ID NO:958, SEQ ID NO:959, SEQ ID NO:960, SEQ ID NO:961, SEQ ID NO:962, SEQ ID NO.963, SEQ ID NO:964, SEQ ID NO:965, SEQ ID NO:966, SEQ ID NO:967, SEQ ID NO:968, SEQ ID NO:969, SEQ ID NO:970, SEQ ID NO:971, SEQ ID NO:972, SEQ ID NO:973, SEQ ID NO:974, SEQ ID NO:975, SEQ ID NO:976, SEQ ID NO:977, SEQ ID NO:978, SEQ ID NO:979, SEQ ID NO:980, SEQ ID NO:981, SEQ ID NO:982, SEQ ID NO:983, SEQ ID NO:984, SEQ ID NO:985, SEQ ID NO:986, SEQ ID NO:987, SEQ ID NO:988, SEQ ID NO:989, SEQ ID NO:990, SEQ ID NO:991, SEQ ID NO:992, SEQ ID NO:993, SEQ ID NO:994, SEQ ID NO:995, SEQ ID NO:996, SEQ ID NO:997, SEQ ID NO:998, SEQ ID NO:999, SEQ ID NO:1000, SEQ ID NO:1001, SEQ ID NO:1002, SEQ ID NO:1003, SEQ ID NO:1004, SEQ ID NO:1005, SEQ ID NO:1006, SEQ ID NO:1007, SEQ ID NO:1008, SEQ ID NO:1009, SEQ ID NO:1010, SEQ ID NO:1011, SEQ ID NO:1012, SEQ ID NO:1013, SEQ ID NO:1014, SEQ ID NO:1015, SEQ ID NO:1016, SEQ ID NO:1017, SEQ ID NO:1018, SEQ ID NO:1019, SEQ ID NO:1020, SEQ ID NO:1021, SEQ ID NO:1022, SEQ ID NO:1023, SEQ ID NO:1024, SEQ ID NO:1025, SEQ ID NO:1026, SEQ ID NO:1027, SEQ ID NO:1028, SEQ ID NO:1029, SEQ ID NO:1030, SEQ ID NO:1031, SEQ ID NO:1032, SEQ ID NO:1033, SEQ ID NO:1034, SEQ ID NO:1035, SEQ ID NO:1036, SEQ ID NO:1037, SEQ ID NO:1038, SEQ ID NO:1039, SEQ ID NO:1040, SEQ ID NO:1041, SEQ ID NO:1042, SEQ ID NO:1043, SEQ ID NO:1044, SEQ ID NO:1045, SEQ ID NO:1046, SEQ ID NO:1047, SEQ ID NO:1048, SEQ ID NO:1049, SEQ ID NO:1050, SEQ ID NO:1051, SEQ ID NO:1052, SEQ ID NO:1053, SEQ ID NO:1054, SEQ ID NO:1055, SEQ ID NO:1056, SEQ ID NO:1057, SEQ ID NO:1058, SEQ ID NO:1059, SEQ ID NO:1060, SEQ ID NO:1061, SEQ ID NO:1062, SEQ ID NO:1063, SEQ ID NO:1064, SEQ ID NO:1065, SEQ ID NO:1066, SEQ ID NO:1067, SEQ ID NO:1068, SEQ ID NO:1069, SEQ ID NO:1070, SEQ ID NO:1071, SEQ ID NO:1072, SEQ ID NO:1073, SEQ ID NO:1074, SEQ ID NO:1075, SEQ ID NO:1076, SEQ ID NO:1077, SEQ ID NO:1078, SEQ ID NO:1079, SEQ ID NO:1080, SEQ ID NO:1081, SEQ ID NO:1082, SEQ ID NO:1083, SEQ ID NO:1084, SEQ ID NO:1085, SEQ ID NO:1086, SEQ ID NO:1087, SEQ ID NO:1088, SEQ ID NO:1089, SEQ ID NO:1090, SEQ ID NO:1091, SEQ ID NO:1092, SEQ ID NO:1093, SEQ ID NO:1094, SEQ ID NO:1095, SEQ ID NO:1096, SEQ ID NO:1097, SEQ ID NO:1098, SEQ ID NO:1099, SEQ ID NO:1100, SEQ ID NO:1101, SEQ ID NO:1102, SEQ ID NO:1103, SEQ ID NO:1104, SEQ ID NO:1105, SEQ ID NO:1106, SEQ ID NO:1107, SEQ ID NO:1108, SEQ ID NO:1109, SEQ ID NO:1110, SEQ ID NO:1111, SEQ ID NO:1112, SEQ ID NO:1013, SEQ ID NO:1014, SEQ ID NO:1015, SEQ ID NO:1016, SEQ ID NO:1117, SEQ ID NO:1018, SEQ ID NO:1019, SEQ ID NO:1120, SEQ ID NO:1121, SEQ ID NO:1122, SEQ ID NO:1123, SEQ ID NO:1124, SEQ ID NO:1125, SEQ ID NO:1126, SEQ ID NO:1127, SEQ ID NO:1128, SEQ ID NO:1129, SEQ ID NO:1130, SEQ ID NO:1131, SEQ ID NO:1132, SEQ ID NO:1133, SEQ ID NO:1134, SEQ ID NO:1135, SEQ ID NO:1136, SEQ ID NO:1137, SEQ ID NO:1138, SEQ ID NO:1139, SEQ ID NO:1140, SEQ ID NO:1141, SEQ ID NO:1142, SEQ ID NO:1143, SEQ ID NO:1144, SEQ ID NO:1145, SEQ ID NO:1146, SEQ ID NO:1147, SEQ ID NO:1148, SEQ ID NO:1149, SEQ ID NO:1150, SEQ ID NO:1151, SEQ ID NO:1152, SEQ ID NO:1153, SEQ ID NO:1154, SEQ ID NO:1155, SEQ ID NO:1156, SEQ ID NO:1157, SEQ ID NO:1158, SEQ ID NO:1159, SEQ ID NO:1160, SEQ ID NO:1161, SEQ ID NO:1162, SEQ ID NO:1163, SEQ ID NO:1164, SEQ ID NO:1165, SEQ ID NO:1166, SEQ ID NO:1167, SEQ ID NO:1168, SEQ ID NO:1169, SEQ ID NO:1170, SEQ ID NO:1171, SEQ ID NO:1172, SEQ ID NO:1173, SEQ ID NO:1174, SEQ ID NO:1175, SEQ ID NO:1176, SEQ ID NO:1177, SEQ ID NO:1178, SEQ ID NO:1179, SEQ ID NO:1180, SEQ ID NO:1181, SEQ ID NO:1182, SEQ ID NO:1183, SEQ ID NO:1184, SEQ ID NO:1185, SEQ ID NO:1186, SEQ ID NO:1187, SEQ ID NO:1188, SEQ ID NO:1189, SEQ ID NO:1190, SEQ ID NO:1191, SEQ ID NO:1192, SEQ ID NO:1193, SEQ ID NO:1194, SEQ ID NO:1195, SEQ ID NO:1196, SEQ ID NO:1197, SEQ ID NO:1198, SEQ ID NO:1199, SEQ ID NO:1200, SEQ ID NO:1201, SEQ ID NO:1202, SEQ ID NO:1203, SEQ ID NO:1204, SEQ ID NO:1205, SEQ ID NO:1206, SEQ ID NO:1207, SEQ ID NO:1208, SEQ ID NO:1209, SEQ ID NO:1210, SEQ ID NO:1211, SEQ ID NO:1212, SEQ ID NO:1213, SEQ ID NO:1214, SEQ ID NO:1215, SEQ ID NO:1216, SEQ ID NO:1217, SEQ ID NO:1218, SEQ ID NO:1219, SEQ ID NO:1220, SEQ ID NO:1221, SEQ ID NO:1222, SEQ ID NO:1223, SEQ ID NO:1224, SEQ ID NO:1225, SEQ ID NO:1226, SEQ ID NO:1227, SEQ ID NO:1228, SEQ ID NO:1229, SEQ ID NO:1231, SEQ ID NO:1231, SEQ ID NO:1232, SEQ ID NO:1233, SEQ ID NO:1234, SEQ ID NO:1235, SEQ ID NO:1236, SEQ ID NO:1237, SEQ ID NO:1238, SEQ ID NO:1239, SEQ ID NO:1240, SEQ ID NO:1241, SEQ ID NO:1242, SEQ ID NO:1243, SEQ ID NO:1244, SEQ ID NO:1245, SEQ ID NO:1246, SEQ ID NO:1247, SEQ ID NO:1248, SEQ ID NO:1249, SEQ ID NO:1250, SEQ ID NO:1251, SEQ ID NO:1252, SEQ ID NO:1253, SEQ ID NO:1254, SEQ ID NO:1255, SEQ ID NO:1256, SEQ ID NO:1257, SEQ ID NO:1258, SEQ ID NO:1259, SEQ ID NO:1260, SEQ ID NO:1261, SEQ ID NO:1262, SEQ ID NO:1263, SEQ ID NO:1264, SEQ ID NO:1265, SEQ ID NO:1266, SEQ ID NO:1267, SEQ ID NO:1268, SEQ ID NO:1269, SEQ ID NO:1270, SEQ ID NO:1271, SEQ ID NO:1272, SEQ ID NO:1273, SEQ ID NO:1274, SEQ ID NO:1275, SEQ ID NO:1276, SEQ ID NO:1277, SEQ ID NO:1278, SEQ ID NO:1279, SEQ ID NO:1280, SEQ ID NO:1281, SEQ ID NO:1282, SEQ ID NO:1283, SEQ ID NO:1284, SEQ ID NO:1285, SEQ ID NO:1286, SEQ ID NO:1287, SEQ ID NO:1288, SEQ ID NO:1289, SEQ ID NO:1290, SEQ ID NO:1291, SEQ ID NO:1292, SEQ ID NO:1293, SEQ ID NO:1294, SEQ ID NO:1295, SEQ ID NO:1296, SEQ ID NO:1297, SEQ ID NO:1298, SEQ ID NO:1299, SEQ ID NO:1300, SEQ ID NO:1301, SEQ ID NO:1302, SEQ ID NO:1303, SEQ ID NO:1304, SEQ ID NO:1305, SEQ ID NO:1306, SEQ ID NO:1307, SEQ ID NO:1308, SEQ ID NO:1309, SEQ ID NO:1310, SEQ ID NO:1311, SEQ ID NO:1312, SEQ ID NO:1313, SEQ ID NO:1314, SEQ ID NO:1315, SEQ ID NO:1316, SEQ ID NO:1317, SEQ ID NO:1318, SEQ ID NO:1319, SEQ ID NO:1320, SEQ ID NO:1321, SEQ ID NO:1322, SEQ ID NO:1323, SEQ ID NO:1324, SEQ ID NO:1325, SEQ ID NO:1326, SEQ ID NO:1327, SEQ ID NO:1328, SEQ ID NO:1329, SEQ ID NO:1330, SEQ ID NO:1331, SEQ ID NO:1332, SEQ ID NO:1333, SEQ ID NO:1334, SEQ ID NO:1335, SEQ ID NO:1336, SEQ ID NO:1337, SEQ ID NO:1338, SEQ ID NO:1339, SEQ ID NO:1340, SEQ ID NO:1341, SEQ ID NO:1342, SEQ ID NO:1343, SEQ ID NO:1344, SEQ ID NO:1345, SEQ ID NO:1346, SEQ ID NO:1347, SEQ ID NO:1348, SEQ ID NO:1349, SEQ ID NO:1350, SEQ ID NO:1351, SEQ ID NO:1352, SEQ ID NO:1353, SEQ ID NO:1354, SEQ ID NO:1355, SEQ ID NO:1356, SEQ ID NO:1357, SEQ ID NO:1358, SEQ ID NO:1359, SEQ ID NO:1360, SEQ ID NO:1361, SEQ ID NO:1362, SEQ ID NO:1363, SEQ ID NO:1364, SEQ ID NO:1365, SEQ ID NO:1366, SEQ ID NO:1367, SEQ ID NO:1368, SEQ ID NO:1369, SEQ ID NO:1370, SEQ ID NO:1371, SEQ ID NO:1372, SEQ ID NO:1373, SEQ ID NO:1374, SEQ ID NO:1375, SEQ ID NO:1376, SEQ ID NO:1377, SEQ ID NO:1378, SEQ ID NO:1379, SEQ ID NO:1380, SEQ ID NO:1381, SEQ ID NO:1382, SEQ ID NO:1383, SEQ ID NO:1384, SEQ ID NO:1385, SEQ ID NO:1386, SEQ ID NO:1387, SEQ ID NO:1388, SEQ ID NO:1389, SEQ ID NO:1390, SEQ ID NO:1391, SEQ ID NO:1392, SEQ ID NO:1393, SEQ ID NO:1394, SEQ ID NO:1395, SEQ ID NO:1396, SEQ ID NO:1397, SEQ ID NO:1398, SEQ ID NO:1399, SEQ ID NO:1400, SEQ ID NO:1401, SEQ ID NO:1402, SEQ ID NO:1403, SEQ ID NO:1404, SEQ ID NO:1405, SEQ ID NO:1406, SEQ ID NO:1407, SEQ ID NO:1408, SEQ ID NO:1409, SEQ ID NO:1410, SEQ ID NO:1411, SEQ ID NO:1412, SEQ ID NO:1413, SEQ ID NO:1414, SEQ ID NO:1415, SEQ ID NO:1416, SEQ ID NO:1417, SEQ ID NO:1418, SEQ ID NO:1419, SEQ ID NO:1420, SEQ ID NO:1421, SEQ ID NO:1422, SEQ ID NO:1423, SEQ ID NO:1424, SEQ ID NO:1425, SEQ ID NO:1426, SEQ ID NO:1427, SEQ ID NO:1428, SEQ ID NO:1429, SEQ ID NO:1430, SEQ ID NO:1431, SEQ ID NO:1432, SEQ ID NO:1433, SEQ ID NO:1434, SEQ ID NO:1435, SEQ ID NO:1436, SEQ ID NO:1437, SEQ ID NO:1438, SEQ ID NO:1439, SEQ ID NO:1440, SEQ ID NO:1441, SEQ ID NO:1442, SEQ ID NO:1443, SEQ ID NO:1444, SEQ ID NO:1445, SEQ ID NO:1446, SEQ ID NO:1447, SEQ ID NO:1448, SEQ ID NO:1449, SEQ ID NO:1450, SEQ ID NO:1451, SEQ ID NO:1452, SEQ ID NO:1453, SEQ ID NO:1454, SEQ ID NO:1455, SEQ ID NO:1456, SEQ ID NO:1457, SEQ ID NO:1458, SEQ ID NO:1459, SEQ ID NO:1460, SEQ ID NO:1461, SEQ ID NO:1462, SEQ ID NO:1463, SEQ ID NO:1464, SEQ ID NO:1465, SEQ ID NO:1466, SEQ ID NO:1467, SEQ ID NO:1468, SEQ ID NO:1469, SEQ ID NO:1470, SEQ ID NO:1471, SEQ ID NO:1472, SEQ ID NO:1473, SEQ ID NO:1474, SEQ ID NO:1475, SEQ ID NO:1476, SEQ ID NO:1477, SEQ ID NO:1478, SEQ ID NO:1479, SEQ ID NO:1480, SEQ ID NO:1481, SEQ ID NO:1482, SEQ ID NO:1483, SEQ ID NO:1484, SEQ ID NO:1485, SEQ ID NO:1486, SEQ ID NO:1487, SEQ ID NO:1488, SEQ ID NO:1489, SEQ ID NO:1490, SEQ ID NO:1491, SEQ ID NO:1492, SEQ ID NO:1493, SEQ ID NO:1494, SEQ ID NO:1495, SEQ ID NO:1496, SEQ ID NO:1497, SEQ ID NO:1498, SEQ ID NO:1499, SEQ ID NO:1500, SEQ ID NO:1501, SEQ ID NO:1502, SEQ ID NO:1503, SEQ ID NO:1504, SEQ ID NO:1505, SEQ ID NO:1506, SEQ ID NO:1507, SEQ ID NO:1508, SEQ ID NO:1509, SEQ ID NO:1510, SEQ ID NO:1511, SEQ ID NO:1512, SEQ ID NO:1513, SEQ ID NO:1514, SEQ ID NO:1515, SEQ ID NO:1516, SEQ ID NO:1517, SEQ ID NO:1518, and SEQ ID NO:1519;
or a complement of said sequence.

3. An isolated polynucleotide consisting essentially of a nucleotide sequence selected from the group consisting of:
SEQ ID NO:1, SEQ ID NO:2, SEQ ID NO:3, SEQ ID NO:4, SEQ ID NO:5, SEQ ID NO:6, SEQ ID NO:7, SEQ ID NO:8, SEQ ID NO:9, SEQ ID NO:10, SEQ ID NO:11, SEQ ID NO:12, SEQ ID NO:13, SEQ ID NO:14, SEQ ID NO:15, SEQ ID NO:16, SEQ ID NO:17, SEQ ID NO:18, SEQ ID NO:19, SEQ ID NO:20, SEQ ID NO:21, SEQ ID NO:22, SEQ ID NO:23, SEQ ID NO:24, SEQ ID NO:25, SEQ ID NO:26, SEQ ID NO:27, SEQ ID NO:28, SEQ ID NO:29, SEQ ID NO:30, SEQ ID NO:31, SEQ ID NO:32, SEQ ID NO:33, SEQ ID NO:34, SEQ ID NO:35, SEQ ID NO:36, SEQ ID NO:37, SEQ ID NO:38, SEQ ID NO:39, SEQ ID NO:40, SEQ ID NO:41, SEQ ID NO:42, SEQ ID NO:43, SEQ ID NO:44, SEQ ID NO:45, SEQ ID NO:46, SEQ ID NO:47, SEQ ID NO:48, SEQ ID NO:49, SEQ ID NO:50, SEQ ID NO:51, SEQ ID NO:52, SEQ ID NO:53, SEQ ID NO:54, SEQ ID NO:55, SEQ ID NO:56, SEQ ID NO:57, SEQ ID NO:58, SEQ ID NO:59, SEQ ID NO:60, SEQ ID NO:61, SEQ ID NO:62, SEQ ID NO:63, SEQ ID NO:64, SEQ ID NO:65, SEQ ID NO:66, SEQ ID NO:67, SEQ ID NO:68, SEQ ID NO:69, SEQ ID NO:70, SEQ ID NO:71, SEQ ID NO:72, SEQ ID NO:73, SEQ ID NO:74, SEQ ID NO:75, SEQ ID NO:76, SEQ ID NO:77, SEQ ID NO:78, SEQ ID NO:79, SEQ ID NO:80, SEQ ID NO:81, SEQ ID NO:82, SEQ ID NO:83, SEQ ID NO:84, SEQ ID NO:85, SEQ ID NO:86, SEQ ID NO:87, SEQ ID NO:88, SEQ ID NO:89, SEQ ID NO:90, SEQ ID NO:91, SEQ ID NO:92, SEQ ID NO:93, SEQ ID NO:94, SEQ ID NO:95, SEQ ID NO:96, SEQ ID NO:97, SEQ ID NO:98, SEQ ID NO:99, SEQ ID NO:100, SEQ ID NO:101, SEQ ID NO:102, SEQ ID NO:103, SEQ ID NO:104, SEQ ID NO:105, SEQ ID NO:106, SEQ ID NO:107, SEQ ID NO:108, SEQ ID NO:109, SEQ ID NO:110, SEQ ID NO:111, SEQ ID NO:112, SEQ ID NO:113, SEQ ID NO:114, SEQ ID NO:115, SEQ ID NO:116, SEQ ID NO:117, SEQ ID NO:118, SEQ ID NO:119, SEQ ID NO:120, SEQ ID NO:121, SEQ ID NO:122, SEQ ID NO:123, SEQ ID NO:124, SEQ ID NO:125, SEQ ID NO:126, SEQ ID NO:127, SEQ ID NO:128, SEQ ID NO:129, SEQ ID NO:130, SEQ ID NO:131, SEQ ID NO:132, SEQ ID NO:133, SEQ ID NO:134, SEQ ID NO:135, SEQ ID NO:136, SEQ ID NO:137, SEQ ID NO:138, SEQ ID NO:139, SEQ ID NO:140, SEQ ID NO:141, SEQ ID NO:142, SEQ ID NO:143, SEQ ID NO:144, SEQ ID NO:145, SEQ ID NO:146, SEQ ID NO:147, SEQ ID NO:148, SEQ ID NO:149, SEQ ID NO:150, SEQ ID NO:151, SEQ ID NO:152, SEQ ID NO:153, SEQ ID NO:154, SEQ ID NO:155, SEQ ID NO:156, SEQ ID NO:157, SEQ ID NO:158, SEQ ID NO:159, SEQ ID NO:160, SEQ ID NO:161, SEQ ID NO:162, SEQ ID NO:163, SEQ ID NO:164, SEQ ID NO:165, SEQ ID NO:166, SEQ ID NO:167, SEQ ID NO:168, SEQ ID NO:169, SEQ ID NO:170, SEQ ID NO:171, SEQ ID NO:172, SEQ ID NO:173, SEQ ID NO:174, SEQ ID NO:175, SEQ ID NO:176, SEQ ID NO:177, SEQ ID NO:178, SEQ ID NO:179, SEQ ID NO:180, SEQ ID NO:181, SEQ ID NO:182, SEQ ID NO:183, SEQ ID NO:184, SEQ ID NO:185, SEQ ID NO:186, SEQ ID NO:187, SEQ ID NO:188, SEQ ID NO:189, SEQ ID NO:190, SEQ ID NO:191, SEQ ID NO:192, SEQ ID NO:193, SEQ ID NO:194, SEQ ID NO:195, SEQ ID NO:196, SEQ ID NO:197, SEQ ID NO:198, SEQ ID NO:199, SEQ ID NO:200, SEQ ID NO:201, SEQ ID NO:202, SEQ ID NO:203, SEQ ID NO:204, SEQ ID NO:205, SEQ ID NO:206, SEQ ID NO:207, SEQ ID NO:208, SEQ ID NO:209, SEQ ID NO:210, SEQ ID NO:211, SEQ ID NO:212, SEQ ID NO:213, SEQ ID NO:214, SEQ ID NO:215, SEQ ID NO:216, SEQ ID NO:217, SEQ ID NO:218, SEQ ID NO:219, SEQ ID NO:220, SEQ ID NO:221, SEQ ID NO:222, SEQ ID NO:223, SEQ ID NO:224, SEQ ID NO:225, SEQ ID NO:226, SEQ ID NO:227, SEQ ID NO:228, SEQ ID NO:229, SEQ ID NO:230, SEQ ID NO:231, SEQ ID NO:232, SEQ ID NO:233, SEQ ID NO:234, SEQ ID NO:235, SEQ ID NO:236, SEQ ID NO:237, SEQ ID NO:238, SEQ ID NO:239, SEQ ID NO:240, SEQ ID NO:241, SEQ ID NO:242, SEQ ID NO:243, SEQ ID NO:244, SEQ ID NO:245, SEQ ID NO:246, SEQ ID NO:247, SEQ ID NO:248, SEQ ID NO:249, SEQ ID NO:250, SEQ ID NO:251, SEQ ID NO:252, SEQ ID NO:253, SEQ ID NO:254, SEQ ID NO:255, SEQ ID NO:256, SEQ ID NO:257, SEQ ID NO:258, SEQ ID NO:259, SEQ ID NO:260, SEQ ID NO:261, SEQ ID NO:262, SEQ ID NO:263, SEQ ID NO:264, SEQ ID NO:265, SEQ ID NO:266, SEQ ID NO:267, SEQ ID NO:268, SEQ ID NO:269, SEQ ID NO:270, SEQ ID NO:271, SEQ ID NO:272, SEQ ID NO:273, SEQ ID NO:274, SEQ ID NO:275, SEQ ID NO:276, SEQ ID NO:277, SEQ ID NO:278, SEQ ID NO:279, SEQ ID NO:280, SEQ ID NO:281, SEQ ID NO:282, SEQ ID NO:283, SEQ ID NO:284, SEQ ID NO:285, SEQ ID NO:286, SEQ ID NO:287, SEQ ID NO:289, SEQ ID NO:289, SEQ ID NO:290, SEQ ID NO:291, SEQ ID NO:292, SEQ ID NO:293, SEQ ID NO:294, SEQ ID NO:295, SEQ ID NO:296, SEQ ID NO:297, SEQ ID NO:298, SEQ ID NO:299, SEQ ID NO:300, SEQ ID NO:301, SEQ ID NO:302, SEQ ID NO:303, SEQ ID NO:304, SEQ ID NO:305, SEQ ID NO:306, SEQ ID NO:307, SEQ ID NO:308, SEQ ID NO:309, SEQ ID NO:310, SEQ ID NO:311, SEQ ID NO:312, SEQ ID NO:313, SEQ ID NO:314, SEQ ID NO:315, SEQ ID NO:316, SEQ ID NO:317, SEQ ID NO:318, SEQ ID NO:319, SEQ ID NO:320, SEQ ID NO:321, SEQ ID NO:322, SEQ ID NO:323, SEQ ID NO:324, SEQ ID NO:325, SEQ ID NO:326, SEQ ID NO:327, SEQ ID NO:328, SEQ ID NO:329, SEQ ID NO:330, SEQ ID NO:331, SEQ ID NO:332, SEQ ID NO:333, SEQ ID NO:334 SEQ ID NO:335, SEQ ID NO:336, SEQ ID NO:337, SEQ ID NO:338, SEQ ID NO:339, SEQ ID NO:340, SEQ ID NO:341, SEQ ID NO:342, SEQ ID NO:343, SEQ ID NO:344, SEQ ID NO:345, SEQ ID NO:346, SEQ ID NO:347, SEQ ID NO:348, SEQ ID NO:349, SEQ ID NO:350, SEQ ID NO:351, SEQ ID NO:352, SEQ ID NO:353, SEQ ID NO:354, SEQ ID NO:355, SEQ ID NO:356, SEQ ID NO:357, SEQ ID NO:358, SEQ ID NO:359, SEQ ID NO:360, SEQ ID NO:361, SEQ ID NO:362, SEQ ID NO:363, SEQ ID NO:364, SEQ ID NO:365, SEQ ID NO:366, SEQ ID NO:367, SEQ ID NO:368, SEQ ID NO:369, SEQ ID NO:370, SEQ ID NO:371, SEQ ID NO:372, SEQ ID NO:373, SEQ ID NO:374, SEQ ID NO:375, SEQ ID NO:376, SEQ ID NO:377, SEQ ID NO:378, SEQ ID NO:379, SEQ ID NO:380, SEQ ID NO:381, SEQ ID NO:382, SEQ ID NO:383, SEQ ID NO:384, SEQ ID NO:385, SEQ ID NO:386, SEQ ID NO:387, SEQ ID NO:388, SEQ ID NO:389, SEQ ID NO:390, SEQ ID NO:391, SEQ ID NO:392, SEQ ID NO:393, SEQ ID NO:394, SEQ ID NO:395, SEQ ID NO:396, SEQ ID NO:397, SEQ ID NO:398, SEQ ID NO:399, SEQ ID NO:400, SEQ ID NO:401, SEQ ID NO:402, SEQ ID NO:403, SEQ ID NO:404, SEQ ID NO:405, SEQ ID NO:406, SEQ ID NO:407, SEQ ID NO:408, SEQ ID NO:409, SEQ ID NO:410, SEQ ID NO:411, SEQ ID NO:412, SEQ ID NO:413, SEQ ID NO:414, SEQ ID NO:415, SEQ ID NO:416, SEQ ID NO:417, SEQ ID NO:418, SEQ ID NO:419, SEQ ID NO:420, SEQ ID NO:421, SEQ ID NO:422, SEQ ID NO:423, SEQ ID NO:424, SEQ ID NO:425, SEQ ID NO:426, SEQ ID NO:427, SEQ ID NO:428, SEQ ID NO:429, SEQ ID NO:430, SEQ ID NO:431, SEQ ID NO:432, SEQ ID NO:433, SEQ ID NO:434, SEQ ID NO:435, SEQ ID NO:436, SEQ ID NO:437, SEQ ID NO:438, SEQ ID NO:439, SEQ ID NO:440, SEQ ID NO:441, SEQ ID NO:442, SEQ ID NO:443, SEQ ID NO:444, SEQ ID NO:445, SEQ ID NO:446, SEQ ID NO:447, SEQ ID NO:448, SEQ ID NO:449, SEQ ID NO:450, SEQ ID NO:451, SEQ ID NO:452, SEQ ID NO:453, SEQ ID NO:454, SEQ ID NO:455, SEQ ID NO:456, SEQ ID NO:457, SEQ ID NO:458, SEQ ID NO:459, SEQ ID NO:460, SEQ ID NO:461, SEQ ID NO:462, SEQ ID NO:463, SEQ ID NO:464, SEQ ID NO:465, SEQ ID NO:466, SEQ ID NO:467, SEQ ID NO:468, SEQ ID NO:469, SEQ ID NO:470, SEQ ID NO:471, SEQ ID NO:472, SEQ ID NO:473, SEQ ID NO:474, SEQ ID NO:475, SEQ ID NO:476, SEQ ID NO:477, SEQ ID NO:478, SEQ ID NO:479, SEQ ID NO:480, SEQ ID NO:481, SEQ ID NO:482, SEQ ID NO:483, SEQ ID NO:484, SEQ ID NO:485, SEQ ID NO:486, SEQ ID NO:487, SEQ ID NO:488, SEQ ID NO:489, SEQ ID NO:490, SEQ ID NO:491, SEQ ID NO:492, SEQ ID NO:493, SEQ ID NO:494, SEQ ID NO:495, SEQ ID NO:496, SEQ ID NO:497, SEQ ID NO:498, SEQ ID NO:499, SEQ ID NO:500, SEQ ID NO:501, SEQ ID NO:502, SEQ ID NO:503, SEQ ID NO:504, SEQ ID NO:505, SEQ ID NO:506, SEQ ID NO:507, SEQ ID NO:508, SEQ ID NO:509, SEQ ID NO:510, SEQ ID NO:511, SEQ ID NO:512, SEQ ID NO:513, SEQ ID NO:514, SEQ ID NO:515, SEQ ID NO:516, SEQ ID NO:517, SEQ ID NO:518, SEQ ID NO:519, SEQ ID NO:520, SEQ ID NO:521, SEQ ID NO:522, SEQ ID NO:523, SEQ ID NO:524, SEQ ID NO:525, SEQ ID NO:526, SEQ ID NO:527, SEQ ID NO:528, SEQ ID NO:529, SEQ ID NO:530, SEQ ID NO:531, SEQ ID NO:532, SEQ ID NO:533, SEQ ID NO:534, SEQ ID NO:535, SEQ ID NO:536, SEQ ID NO:537, SEQ ID NO:538, SEQ ID NO:539, SEQ ID NO:540, SEQ ID NO:541, SEQ ID NO:542, SEQ ID NO:543, SEQ ID NO:544, SEQ ID NO:545, SEQ ID NO:546, SEQ ID NO:547, SEQ ID NO:548, SEQ ID NO:549, SEQ ID NO:550, SEQ ID NO:551, SEQ ID NO:552, SEQ ID NO:553, SEQ ID NO:554, SEQ ID NO:555, SEQ ID NO:556, SEQ ID NO:557, SEQ ID NO:558, SEQ ID NO:559, SEQ ID NO:560, SEQ ID NO:561, SEQ ID NO:562, SEQ ID NO:563, SEQ ID NO:564, SEQ ID NO:565, SEQ ID NO:566, SEQ ID NO:567, SEQ ID NO:568, SEQ ID NO:569, SEQ ID NO:570, SEQ ID NO:571, SEQ ID NO:572, SEQ ID NO:573, SEQ ID NO:574, SEQ ID NO:575, SEQ ID NO:576, SEQ ID NO:577, SEQ ID NO:578, SEQ ID NO:579, SEQ ID NO:580, SEQ ID NO:581, SEQ ID NO:582, SEQ ID NO:583, SEQ ID NO:584, SEQ ID NO:585, SEQ ID NO:586, SEQ ID NO:587, SEQ ID NO:588, SEQ ID NO:589, SEQ ID NO:590, SEQ ID NO:591, SEQ ID NO:592, SEQ ID NO:593, SEQ ID NO.594, SEQ ID NO:595, SEQ ID NO:596, SEQ ID NO:597, SEQ ID NO:598, SEQ ID NO:599, SEQ ID NO:600, SEQ ID NO:601, SEQ ID NO:602, SEQ ID NO:603, SEQ ID NO:604, SEQ ID NO:605, SEQ ID NO:606, SEQ ID NO:607, SEQ ID NO:608, SEQ ID NO:609, SEQ ID NO:610, SEQ ID NO:611, SEQ ID NO:612, SEQ ID NO:613, SEQ ID NO:614, SEQ ID NO:615, SEQ ID NO:616, SEQ ID NO:617, SEQ ID NO:618, SEQ ID NO:619, SEQ ID NO:620, SEQ ID NO:621, SEQ ID NO:622, SEQ ID NO:623, SEQ ID NO:624, SEQ ID NO:625, SEQ ID NO:626, SEQ ID NO:627, SEQ ID NO:628, SEQ ID NO:629, SEQ ID NO:630, SEQ ID NO:631, SEQ ID NO:632, SEQ ID NO:633, SEQ ID NO:634, SEQ ID NO:635, SEQ ID NO:636, SEQ ID NO:637, SEQ ID NO:638, SEQ ID NO:639, SEQ ID NO:640, SEQ ID NO:641, SEQ ID NO:642, SEQ ID NO:643, SEQ ID NO:644, SEQ ID NO:645, SEQ ID NO:646, SEQ ID NO:647, SEQ ID NO:648, SEQ ID NO:649, SEQ ID NO:650, SEQ ID NO:651, SEQ ID NO:652, SEQ ID NO:653, SEQ ID NO:654, SEQ ID NO:655, SEQ ID NO:656, SEQ ID NO:657, SEQ ID NO:658, SEQ ID NO:659, SEQ ID NO:660, SEQ ID NO:661, SEQ ID NO:662, SEQ ID NO:663, SEQ ID NO:664, SEQ ID NO:665, SEQ ID NO:666, SEQ ID NO:667, SEQ ID NO:668, SEQ ID NO:669, SEQ ID NO:670, SEQ ID NO:671, SEQ ID NO:672, SEQ ID NO:673, SEQ ID NO:674, SEQ ID NO:675, SEQ ID NO:676, SEQ ID NO:677, SEQ ID NO:678, SEQ ID NO:679, SEQ ID NO:680, SEQ ID NO:681, SEQ ID NO:682, SEQ ID NO:683, SEQ ID NO:684, SEQ ID NO:685, SEQ ID NO:686, SEQ ID NO:687, SEQ ID NO:688, SEQ ID NO:689, SEQ ID NO:690, SEQ ID NO:691, SEQ ID NO:692, SEQ ID NO:693, SEQ ID NO:694, SEQ ID NO:695, SEQ ID NO:696, SEQ ID NO:697, SEQ ID NO:698, SEQ ID NO:699, SEQ ID NO:700, SEQ ID NO:701, SEQ ID NO:702, SEQ ID NO:703, SEQ ID NO:704, SEQ ID NO:705, SEQ ID NO:706, SEQ ID NO:707, SEQ ID NO:708, SEQ ID NO:709, SEQ ID NO:710, SEQ ID NO:711, SEQ ID NO:712, SEQ ID NO:713, SEQ ID NO:714, SEQ ID NO:715, SEQ ID NO:716, SEQ ID NO:717, SEQ ID NO:718, SEQ ID NO:719, SEQ ID NO:720, SEQ ID NO:721, SEQ ID NO:722, SEQ ID NO:723, SEQ ID NO:724, SEQ ID NO:725, SEQ ID NO:726, SEQ ID NO:727, SEQ ID NO:728, SEQ ID NO:729, SEQ ID NO:730, SEQ ID NO:731, SEQ ID NO:732, SEQ ID NO:733, SEQ ID NO:734, SEQ ID NO:735, SEQ ID NO:736, SEQ ID NO:737, SEQ ID NO:738, SEQ ID NO:739, SEQ ID NO:740, SEQ ID NO:741, SEQ ID NO:742, SEQ ID NO:743, SEQ ID NO:744, SEQ ID NO:745, SEQ ID NO:746, SEQ ID NO:747, SEQ ID NO:748, SEQ ID NO:749, SEQ ID NO:750, SEQ ID NO:751, SEQ ID NO:752, SEQ ID NO:753, SEQ ID NO:754, SEQ ID NO:755, SEQ ID NO:756, SEQ ID NO:757, SEQ ID NO:758, SEQ ID NO:759, SEQ ID NO:760, SEQ ID NO:761, SEQ ID NO:762, SEQ ID NO:763, SEQ ID NO:764, SEQ ID NO:765, SEQ ID NO:766, SEQ ID NO:767, SEQ ID NO:768, SEQ ID NO:769, SEQ ID NO:770, SEQ ID NO:771, SEQ ID NO:772, SEQ ID NO:773, SEQ ID NO:774, SEQ ID NO:775, SEQ ID NO:776, SEQ ID NO:777, SEQ ID NO:778, SEQ ID NO:779, SEQ ID NO:780, SEQ ID NO:781, SEQ ID NO:782, SEQ ID NO:783, SEQ ID NO:784, SEQ ID NO:785, SEQ ID NO:786, SEQ ID NO:787, SEQ ID NO:788, SEQ ID NO:789, SEQ ID NO:790, SEQ ID NO:791, SEQ ID NO:792, SEQ ID NO:793, SEQ ID NO:794, SEQ ID NO:795, SEQ ID NO:796, SEQ ID NO:797, SEQ ID NO:798, SEQ ID NO:799, SEQ ID NO:800, SEQ ID NO:801, SEQ ID NO:802, SEQ ID NO:803, SEQ ID NO:804, SEQ ID NO:805, SEQ ID NO:806, SEQ ID NO:807, SEQ ID NO:808, SEQ ID NO:809, SEQ ID NO:810, SEQ ID NO:811, SEQ ID NO:812, SEQ ID NO:813, SEQ ID NO:814, SEQ ID NO:815, SEQ ID NO:816, SEQ ID NO:817, SEQ ID NO:818, SEQ ID NO:819, SEQ ID NO:820, SEQ ID NO:821, SEQ ID NO:822, SEQ ID NO:823, SEQ ID NO:824, SEQ ID NO:825, SEQ ID NO:826, SEQ ID NO:827, SEQ ID NO:828, SEQ ID NO:829, SEQ ID NO:830, SEQ ID NO:831, SEQ ID NO:832, SEQ ID NO:833, SEQ ID NO:834, SEQ ID NO:835, SEQ ID NO:836, SEQ ID NO:837, SEQ ID NO:838, SEQ ID NO:839, SEQ ID NO:840, SEQ ID NO:841, SEQ ID NO:842, SEQ ID NO:843, SEQ ID NO:844, SEQ ID NO:845, SEQ ID NO:846, SEQ ID NO:847, SEQ ID NO:848, SEQ ID NO:849, SEQ ID NO:850, SEQ ID NO:851, SEQ ID NO:852, SEQ ID NO:853, SEQ ID NO:854, SEQ ID NO:855, SEQ ID NO:856, SEQ ID NO:857, SEQ ID NO:858, SEQ ID NO:859, SEQ ID NO:860, SEQ ID NO:861, SEQ ID NO:862, SEQ ID NO:863, SEQ ID NO:864, SEQ ID NO:865, SEQ ID NO:866, SEQ ID NO:867, SEQ ID NO:868, SEQ ID NO:869, SEQ ID NO:870, SEQ ID NO:871, SEQ ID NO:872, SEQ ID NO:873, SEQ ID NO:874, SEQ ID NO:875, SEQ ID NO:876, SEQ ID NO:877, SEQ ID NO:878, SEQ ID NO:879, SEQ ID NO:880, SEQ ID NO:881, SEQ ID NO:882, SEQ ID NO:883, SEQ ID NO:884, SEQ ID NO:885, SEQ ID NO:886, SEQ ID NO:887, SEQ ID NO:888, SEQ ID NO:889, SEQ ID NO:890, SEQ ID NO:891, SEQ ID NO:892, SEQ ID NO:893, SEQ ID NO:894, SEQ ID NO:895, SEQ ID NO:896, SEQ ID NO:897, SEQ ID NO:898, SEQ ID NO:899, SEQ ID NO:900, SEQ ID NO:901, SEQ ID NO:902, SEQ ID NO:903, SEQ ID NO:904, SEQ ID NO:905, SEQ ID NO:906, SEQ ID NO:907, SEQ ID NO:908, SEQ ID NO:909, SEQ ID NO:910, SEQ ID NO:911, SEQ ID NO:912, SEQ ID NO:913, SEQ ID NO:914, SEQ ID NO:915, SEQ ID NO:916, SEQ ID NO:917, SEQ ID NO:918, SEQ ID NO:919, SEQ ID NO:920, SEQ ID NO:921, SEQ ID NO:922, SEQ ID NO:923, SEQ ID NO:924, SEQ ID NO:925, SEQ ID NO:926, SEQ ID NO:927, SEQ ID NO:928, SEQ ID NO:929, SEQ ID NO:930, SEQ ID NO:931, SEQ ID NO:932, SEQ ID NO:933, SEQ ID NO:934, SEQ ID NO:935, SEQ ID NO:936, SEQ ID NO:937, SEQ ID NO:938, SEQ ID NO:939, SEQ ID NO:940, SEQ ID NO:941, SEQ ID NO:942, SEQ ID NO:943, SEQ ID NO:944, SEQ ID NO:945, SEQ ID NO:946, SEQ ID NO:947, SEQ ID NO:948, SEQ ID NO:949, SEQ ID NO:950, SEQ ID NO:951, SEQ ID NO:952, SEQ ID NO:953, SEQ ID NO:954, SEQ ID NO:955, SEQ ID NO:956, SEQ ID NO:957, SEQ ID NO:958, SEQ ID NO:959, SEQ ID NO:960, SEQ ID NO:961, SEQ ID NO:962, SEQ ID NO:963, SEQ ID NO:964, SEQ ID NO:965, SEQ ID NO:966, SEQ ID NO:967, SEQ ID NO:968, SEQ ID NO:969, SEQ ID NO:970, SEQ ID NO:971, SEQ ID NO:972, SEQ ID NO:973, SEQ ID NO:974, SEQ ID NO:975, SEQ ID NO:976, SEQ ID NO:977, SEQ ID NO:978, SEQ ID NO:979, SEQ ID NO:980, SEQ ID NO:981, SEQ ID NO:982, SEQ ID NO:983, SEQ ID NO:984, SEQ ID NO:985, SEQ ID NO:986, SEQ ID NO:987, SEQ ID NO:988, SEQ ID NO:989, SEQ ID NO:990, SEQ ID NO:991, SEQ ID NO:992, SEQ ID NO:993, SEQ ID NO:994, SEQ ID NO:995, SEQ ID NO:996, SEQ ID NO:997, SEQ ID NO:998, SEQ ID NO:999, SEQ ID NO:1000, SEQ ID NO:1001, SEQ ID NO:1002, SEQ ID NO:1003, SEQ ID NO:1004, SEQ ID NO:1005, SEQ ID NO:1006, SEQ ID NO:1007, SEQ ID NO:1008, SEQ ID NO:1009, SEQ ID NO:1010, SEQ ID NO:1011, SEQ ID NO:1012, SEQ ID NO:1013, SEQ ID NO:1014, SEQ ID NO:1015, SEQ ID NO:1016, SEQ ID NO:1017, SEQ ID NO:1018, SEQ ID NO:1019, SEQ ID NO:1020, SEQ ID NO:1021, SEQ ID NO:1022, SEQ ID NO:1023, SEQ ID NO:1024, SEQ ID NO:1025, SEQ ID NO:1026, SEQ ID NO:1027, SEQ ID NO:1028, SEQ ID NO:1029, SEQ ID NO:1030, SEQ ID NO:1031, SEQ ID NO:1032, SEQ ID NO:1033, SEQ ID NO:1034, SEQ ID NO:1035, SEQ ID NO:1036, SEQ ID NO:1037, SEQ ID NO:1038, SEQ ID NO:1039, SEQ ID NO:1040, SEQ ID NO:1041, SEQ ID NO:1042, SEQ ID NO:1043, SEQ ID NO:1044, SEQ ID NO:1045, SEQ ID NO:1046, SEQ ID NO:1047, SEQ ID NO:1048, SEQ ID NO:1049, SEQ ID NO:1050, SEQ ID NO:1051, SEQ ID NO:1052, SEQ ID NO:1053, SEQ ID NO:1054, SEQ ID NO:1055, SEQ ID NO:1056, SEQ ID NO:1057, SEQ ID NO:1058, SEQ ID NO:1059, SEQ ID NO:1060, SEQ ID NO:1061, SEQ ID NO:1062, SEQ ID NO:1063, SEQ ID NO:1064, SEQ ID NO:1065, SEQ ID NO:1066, SEQ ID NO:1067, SEQ ID NO:1068, SEQ ID NO:1069, SEQ ID NO:1070, SEQ ID NO:1071, SEQ ID NO:1072, SEQ ID NO:1073, SEQ ID NO:1074, SEQ ID NO:1075, SEQ ID NO:1076, SEQ ID NO:1077, SEQ ID NO:1078, SEQ ID NO:1079, SEQ ID NO:1080, SEQ ID NO:1081, SEQ ID NO:1082, SEQ ID NO:1083, SEQ ID NO:1084, SEQ ID NO:1085, SEQ ID NO:1086, SEQ ID NO:1087, SEQ ID NO:1088, SEQ ID NO:1089, SEQ ID NO:1090, SEQ ID NO:1091, SEQ ID NO:1092, SEQ ID NO:1093, SEQ ID NO:1094, SEQ ID NO:1095, SEQ ID NO:1096, SEQ ID NO:1097, SEQ ID NO:1098, SEQ ID NO:1099, SEQ ID NO:1100, SEQ ID NO:1101, SEQ ID NO:1102, SEQ ID NO:1103, SEQ ID NO:1104, SEQ ID NO:1105, SEQ ID NO:1106, SEQ ID NO:1107, SEQ ID NO:1108, SEQ ID NO:1109, SEQ ID NO:1110, SEQ ID NO:1111, SEQ ID NO:1112, SEQ ID NO:1113, SEQ ID NO:1114, SEQ ID NO:1115, SEQ ID NO:1116, SEQ ID NO:1117, SEQ ID NO:1118, SEQ ID NO:1119, SEQ ID NO:1120, SEQ ID NO:1121, SEQ ID NO:1122, SEQ ID NO:1123, SEQ ID NO:1124, SEQ ID NO:1125, SEQ ID NO:1126, SEQ ID NO:1127, SEQ ID NO:1128, SEQ ID NO:1129, SEQ ID NO:1130, SEQ ID NO:1131, SEQ ID NO:1132, SEQ ID NO:1133, SEQ ID NO:1134, SEQ ID NO:1135, SEQ ID NO:1136, SEQ ID NO:1137, SEQ ID NO:1138, SEQ ID NO:1139, SEQ ID NO:1140, SEQ ID NO:1141, SEQ ID NO:1142, SEQ ID NO:1143, SEQ ID NO:1144, SEQ ID NO:1145, SEQ ID NO:1146, SEQ ID NO:1147, SEQ ID NO:1148, SEQ ID NO:1149, SEQ ID NO:1150, SEQ ID NO:1151, SEQ ID NO:1152, SEQ ID NO:1153, SEQ ID NO:1154, SEQ ID NO:1155, SEQ ID NO:1156, SEQ ID NO:1157, SEQ ID NO:1158, SEQ ID NO:1159, SEQ ID NO:1160, SEQ ID NO:1161, SEQ ID NO:1162, SEQ ID NO:1163, SEQ ID NO:1164, SEQ ID NO:1165, SEQ ID NO:1166, SEQ ID NO:1167, SEQ ID NO:1168, SEQ ID NO:1169, SEQ ID NO:1170, SEQ ID NO:1171, SEQ ID NO:1172, SEQ ID NO:1173, SEQ ID NO:1174, SEQ ID NO:1175, SEQ ID NO:1176, SEQ ID NO:1177, SEQ ID NO:1178, SEQ ID NO:1179, SEQ ID NO:1180, SEQ ID NO:1181, SEQ ID NO:1182, SEQ ID NO:1183, SEQ ID NO:1184, SEQ ID NO:1185, SEQ ID NO:1186, SEQ ID NO:1187, SEQ ID NO:1188, SEQ ID NO:1189, SEQ ID NO:1190, SEQ ID NO:1191, SEQ ID NO:1192, SEQ ID NO:1193, SEQ ID NO:1194, SEQ ID NO:1195, SEQ ID NO:1196, SEQ ID NO:1197, SEQ ID NO:1198, SEQ ID NO:1199, SEQ ID NO:1200, SEQ ID NO:1201, SEQ ID NO:1202, SEQ ID NO:1203, SEQ ID NO:1204, SEQ ID NO:1205, SEQ ID NO:1206, SEQ ID NO:1207, SEQ ID NO:1208, SEQ ID NO:1209, SEQ ID NO:1210, SEQ ID NO:1211, SEQ ID NO:1212, SEQ ID NO:1213, SEQ ID NO:1214, SEQ ID NO:1215, SEQ ID NO:1216, SEQ ID NO:1217, SEQ ID NO:1218, SEQ ID NO:1219, SEQ ID NO:1220, SEQ ID NO:1221, SEQ ID NO:1222, SEQ ID NO:1223, SEQ ID NO:1224, SEQ ID NO:1225, SEQ ID NO:1226, SEQ ID NO:1227, SEQ ID NO:1228, SEQ ID NO:1229, SEQ ID NO:1230, SEQ ID NO:1231, SEQ ID NO:1232, SEQ ID NO:1233, SEQ ID NO:1234, SEQ ID NO:1235, SEQ ID NO:1236, SEQ ID NO:1237, SEQ ID NO:1238, SEQ ID NO:1239, SEQ ID NO:1240, SEQ ID NO:1241, SEQ ID NO:1242, SEQ ID NO:1243, SEQ ID NO:1244, SEQ ID NO:1245, SEQ ID NO:1246, SEQ ID NO:1247, SEQ ID NO:1248, SEQ ID NO:1249, SEQ ID NO:1250, SEQ ID NO:1251, SEQ ID NO:1252, SEQ ID NO:1253, SEQ ID NO:1254, SEQ ID NO:1255, SEQ ID NO:1256, SEQ ID NO:1257, SEQ ID NO:1258, SEQ ID NO:1259, SEQ ID NO:1260, SEQ ID NO:1261, SEQ ID NO:1262, SEQ ID NO:1263, SEQ ID NO:1264, SEQ ID NO:1265, SEQ ID NO:1266, SEQ ID NO:1267, SEQ ID NO:1268, SEQ ID NO:1269, SEQ ID NO:1270, SEQ ID NO:1271, SEQ ID NO:1272, SEQ ID NO:1273, SEQ ID NO:1274, SEQ ID NO:1275, SEQ ID NO:1276, SEQ ID NO:1277, SEQ ID NO:1278, SEQ ID NO:1279, SEQ ID NO:1280, SEQ ID NO:1281, SEQ ID NO:1282, SEQ ID NO:1283, SEQ ID NO:1284, SEQ ID NO:1285, SEQ ID NO:1286, SEQ ID NO:1287, SEQ ID NO:1288, SEQ ID NO:1289, SEQ ID NO:1290, SEQ ID NO:1291, SEQ ID NO:1292, SEQ ID NO:1293, SEQ ID NO:1294, SEQ ID NO:1295, SEQ ID NO:1296, SEQ ID NO:1297, SEQ ID NO:1298, SEQ ID NO:1299, SEQ ID NO:1300, SEQ ID NO:1301, SEQ ID NO:1302, SEQ ID NO:1303, SEQ ID NO:1304, SEQ ID NO:1305, SEQ ID NO:1306, SEQ ID NO:1307, SEQ ID NO:1308, SEQ ID NO:1309, SEQ ID NO:1310, SEQ ID NO:1311, SEQ ID NO:1312, SEQ ID NO:1313, SEQ ID NO:1314, SEQ ID NO:1315, SEQ ID NO:1316, SEQ ID NO:1317, SEQ ID NO:1318, SEQ ID NO:1319, SEQ ID NO:1320, SEQ ID NO:1321, SEQ ID NO:1322, SEQ ID NO:1323, SEQ ID NO:1324, SEQ ID NO:1325, SEQ ID NO:1326, SEQ ID NO:1327, SEQ ID NO:1328, SEQ ID NO:1329, SEQ ID NO:1330, SEQ ID NO:1331, SEQ ID NO:1332, SEQ ID NO:1333, SEQ ID NO:1334, SEQ ID NO:1335, SEQ ID NO:1336, SEQ ID NO:1337, SEQ ID NO:1338, SEQ ID NO:1339, SEQ ID NO:1340, SEQ ID NO:1341, SEQ ID NO:1342, SEQ ID NO:1343, SEQ ID NO:1344, SEQ ID NO:1345, SEQ ID NO:1346, SEQ ID NO:1347, SEQ ID NO:1348, SEQ ID NO:1349, SEQ ID NO:1350, SEQ ID NO:1351, SEQ ID NO:1352, SEQ ID NO:1353, SEQ ID NO:1354, SEQ ID NO:1355, SEQ ID NO:1356, SEQ ID NO:1357, SEQ ID NO:1358, SEQ ID NO:1359, SEQ ID NO:1360, SEQ ID NO:1361, SEQ ID NO:1362, SEQ ID NO:1363, SEQ ID NO:1364, SEQ ID NO:1365, SEQ ID NO:1366, SEQ ID NO:1367, SEQ ID NO:1368, SEQ ID NO:1369, SEQ ID NO:1370, SEQ ID NO:1371, SEQ ID NO:1372, SEQ ID NO:1373, SEQ ID NO:1374, SEQ ID NO:1375, SEQ ID NO:1376, SEQ ID NO:1377, SEQ ID NO:1378, SEQ ID NO:1379, SEQ ID NO:1380, SEQ ID NO:1381, SEQ ID NO:1382, SEQ ID NO:1383, SEQ ID NO:1384, SEQ ID NO:1385, SEQ ID NO:1386, SEQ ID NO:1387, SEQ ID NO:1388, SEQ ID NO:1389, SEQ ID NO:1390, SEQ ID NO:1391, SEQ ID NO:1392, SEQ ID NO:1393, SEQ ID NO:1394, SEQ ID NO:1395, SEQ ID NO:1396, SEQ ID NO:1397, SEQ ID NO:1398, SEQ ID NO:1399, SEQ ID NO:1400, SEQ ID NO:1401, SEQ ID NO:1402, SEQ ID NO:1403, SEQ ID NO:1404, SEQ ID NO:1405, SEQ ID NO:1406, SEQ ID NO:1407, SEQ ID NO:1408, SEQ ID NO:1409, SEQ ID NO:1410, SEQ ID NO:1411, SEQ ID NO:1412, SEQ ID NO:1413, SEQ ID NO:1414, SEQ ID NO:1415, SEQ ID NO:1416, SEQ ID NO:1417, SEQ ID NO:1418, SEQ ID NO:1419, SEQ ID NO:1420, SEQ ID NO:1421, SEQ ID NO:1422, SEQ ID NO:1423, SEQ ID NO:1424, SEQ ID NO:1425, SEQ ID NO:1426, SEQ ID NO:1427, SEQ ID NO:1428, SEQ ID NO:1429, SEQ ID NO:1430, SEQ ID NO:1431, SEQ ID NO:1432, SEQ ID NO:1433, SEQ ID NO:1434, SEQ ID NO:1435, SEQ ID NO:1436, SEQ ID NO:1437, SEQ ID NO:1438, SEQ ID NO:1439, SEQ ID NO:1440, SEQ ID NO:1441, SEQ ID NO:1442, SEQ ID NO:1443, SEQ ID NO:1444, SEQ ID NO:1445, SEQ ID NO:1446, SEQ ID NO:1447, SEQ ID NO:1448, SEQ ID NO:1449, SEQ ID NO:1450, SEQ ID NO:1451, SEQ ID NO:1452, SEQ ID NO:1453, SEQ ID NO:1454, SEQ ID NO:1455, SEQ ID NO:1456, SEQ ID NO:1457, SEQ ID NO:1458, SEQ ID NO:1459, SEQ ID NO:1460, SEQ ID NO:1461, SEQ ID NO:1462, SEQ ID NO:1463, SEQ ID NO:1464, SEQ ID NO:1465, SEQ ID NO:1466, SEQ ID NO:1467, SEQ ID NO:1468, SEQ ID NO:1469, SEQ ID NO:1470, SEQ ID NO:1471, SEQ ID NO:1472, SEQ ID NO:1473, SEQ ID NO:1474, SEQ ID NO:1475, SEQ ID NO:1476, SEQ ID NO:1477, SEQ ID NO:1478, SEQ ID NO:1479, SEQ ID NO:1480, SEQ ID NO:1481, SEQ ID NO:1482, SEQ ID NO:1483, SEQ ID NO:1484, SEQ ID NO:1485, SEQ ID NO:1486, SEQ ID NO:1487, SEQ ID NO:1488, SEQ ID NO:1489, SEQ ID NO:1490, SEQ ID NO:1491, SEQ ID NO:1492, SEQ ID NO:1493, SEQ ID NO:1494, SEQ ID NO:1495, SEQ ID NO:1496, SEQ ID NO:1497, SEQ ID NO:1498, SEQ ID NO:1499, SEQ ID NO:1500, SEQ ID NO:1501, SEQ ID NO:1502, SEQ ID NO:1503, SEQ ID NO:1504, SEQ ID NO:1505, SEQ ID NO:1506, SEQ ID NO:1507, SEQ ID NO:1508, SEQ ID NO:1509, SEQ ID NO:1510, SEQ ID NO:1511, SEQ ID NO:1512, SEQ ID NO:1513, SEQ ID NO:1514, SEQ ID NO:1515, SEQ ID NO:1516, SEQ ID NO:1517, SEQ ID NO:1518, and SEQ ID NO:1519;
or a complement of said sequence.

4. An isolated polynucleotide comprising a nucleotide sequence which hybridizes to a sequence selected from the group consisting of:
SEQ ID NO:1, SEQ ID NO:2, SEQ ID NO:3, SEQ ID NO:4, SEQ ID NO:5, SEQ ID NO:6, SEQ ID NO:7, SEQ ID NO:8, SEQ ID NO:9, SEQ ID NO:10, SEQ ID NO:11, SEQ ID NO:12, SEQ ID NO:13, SEQ ID NO:14, SEQ ID NO:15, SEQ ID NO:16, SEQ ID NO:17, SEQ ID NO:18, SEQ ID NO:19, SEQ ID NO:20, SEQ ID NO:21, SEQ ID NO:22, SEQ ID NO:23, SEQ ID NO:24, SEQ ID NO:25, SEQ ID NO:26, SEQ ID NO:27, SEQ ID NO:28, SEQ ID NO:29, SEQ ID NO:30, SEQ ID NO:31, SEQ ID NO:32, SEQ ID NO:33, SEQ ID NO:34, SEQ ID NO:35, SEQ ID NO:36, SEQ ID NO:37, SEQ ID NO:38, SEQ ID NO:39, SEQ ID NO:40, SEQ ID NO:41, SEQ ID NO:42, SEQ ID NO:43, SEQ ID NO:44, SEQ ID NO:45, SEQ ID NO:46, SEQ ID NO:47, SEQ ID NO:48, SEQ ID NO:49, SEQ ID NO:50, SEQ ID NO:51, SEQ ID NO:52, SEQ ID NO:53, SEQ ID NO:54, SEQ ID NO:55, SEQ ID NO:56, SEQ ID NO:57, SEQ ID NO:58, SEQ ID NO:59, SEQ ID NO:60, SEQ ID NO:61, SEQ ID NO:62, SEQ ID NO:63, SEQ ID NO:64, SEQ ID NO:65, SEQ ID NO:66, SEQ ID NO:67, SEQ ID NO:68, SEQ ID NO:69, SEQ ID NO:70, SEQ ID NO:71, SEQ ID NO:72, SEQ ID NO:73, SEQ ID NO:74, SEQ ID NO:75, SEQ ID NO:76, SEQ ID NO:77, SEQ ID NO:78, SEQ ID NO:79, SEQ ID NO:80, SEQ ID NO:81, SEQ ID NO:82, SEQ ID NO:83, SEQ ID NO:84, SEQ ID NO:85, SEQ ID NO:86, SEQ ID NO:87, SEQ ID NO:88, SEQ ID NO:89, SEQ ID NO:90, SEQ ID NO:91, SEQ ID NO:92, SEQ ID NO:93, SEQ ID NO:94, SEQ ID NO:95, SEQ ID NO:96, SEQ ID NO:97, SEQ ID NO:98, SEQ ID NO:99, SEQ ID NO:100, SEQ ID NO:101, SEQ ID NO:102, SEQ ID NO:103, SEQ ID NO:104, SEQ ID NO:105, SEQ ID NO:106, SEQ ID NO:107, SEQ ID NO:108, SEQ ID NO:109, SEQ ID NO:110, SEQ ID NO:111, SEQ ID NO:112, SEQ ID NO:113, SEQ ID NO:114, SEQ ID NO:115, SEQ ID NO:116, SEQ ID NO:117, SEQ ID NO:118, SEQ ID NO:119, SEQ ID NO:120, SEQ ID NO:121, SEQ ID NO:122, SEQ ID NO:123, SEQ ID NO:124, SEQ ID NO:125, SEQ ID NO:126, SEQ ID NO:127, SEQ ID NO:128, SEQ ID NO:129, SEQ ID NO:130, SEQ ID NO:131, SEQ ID NO:132, SEQ ID NO:133, SEQ ID NO:134, SEQ ID NO:135, SEQ ID NO:136, SEQ ID NO:137, SEQ ID NO:138, SEQ ID NO:139, SEQ ID NO:140, SEQ ID NO:141, SEQ ID NO:142, SEQ ID NO:143, SEQ ID NO:144, SEQ ID NO:145, SEQ ID NO:146, SEQ ID NO:147, SEQ ID NO:148, SEQ ID NO:149, SEQ ID NO:150, SEQ ID NO:151, SEQ ID NO:152, SEQ ID NO:153, SEQ ID NO:154, SEQ ID NO:155, SEQ ID NO:156, SEQ ID NO:157, SEQ ID NO:158, SEQ ID NO:159, SEQ ID NO:160, SEQ ID NO:161, SEQ ID NO:162, SEQ ID NO:163, SEQ ID NO:164, SEQ ID NO:165, SEQ ID NO:166, SEQ ID NO:167, SEQ ID NO:168, SEQ ID NO:169, SEQ ID NO:170, SEQ ID NO:171, SEQ ID NO:172, SEQ ID NO:173, SEQ ID NO:174, SEQ ID NO:175, SEQ ID NO:176, SEQ ID NO:177, SEQ ID NO:178, SEQ ID NO:179, SEQ ID NO:180, SEQ ID NO:181, SEQ ID NO:182, SEQ ID NO:183, SEQ ID NO:184, SEQ ID NO:185, SEQ ID NO:186, SEQ ID NO:187, SEQ ID NO:188, SEQ ID NO:189, SEQ ID NO:190, SEQ ID NO:191, SEQ ID NO:192, SEQ ID NO:193, SEQ ID NO:194, SEQ ID NO:195, SEQ ID NO:196, SEQ ID NO:197, SEQ ID NO:198, SEQ ID NO:199, SEQ ID NO:200, SEQ ID NO:201, SEQ ID NO:202, SEQ ID NO:203, SEQ ID NO:204, SEQ ID NO:205, SEQ ID NO:206, SEQ ID NO:207, SEQ ID NO:208, SEQ ID NO:209, SEQ ID NO:210, SEQ ID NO:211, SEQ ID NO:212, SEQ ID NO:213, SEQ ID NO:214, SEQ ID NO:215, SEQ ID NO:216, SEQ ID NO:217, SEQ ID NO:218, SEQ ID NO:219, SEQ ID NO:220, SEQ ID NO:221, SEQ ID NO:222, SEQ ID NO:223, SEQ ID NO:224, SEQ ID NO:225, SEQ ID NO:226, SEQ ID NO:227, SEQ ID NO:228, SEQ ID NO:229, SEQ ID NO:230, SEQ ID NO:231, SEQ ID NO:232, SEQ ID NO:233, SEQ ID NO:234, SEQ ID NO:235, SEQ ID NO:236, SEQ ID NO:237, SEQ ID NO:238, SEQ ID NO:239, SEQ ID NO:240, SEQ ID NO:241, SEQ ID NO:242, SEQ ID NO:243, SEQ ID NO:244, SEQ ID NO:245, SEQ ID NO:246, SEQ ID NO:247, SEQ ID NO:248, SEQ ID NO:249, SEQ ID NO:250, SEQ ID NO:251, SEQ ID NO:252, SEQ ID NO:253, SEQ ID NO:254, SEQ ID NO:255, SEQ ID NO:256, SEQ ID NO:257, SEQ ID NO:258, SEQ ID NO:259, SEQ ID NO:260, SEQ ID NO:261, SEQ ID NO:262, SEQ ID NO:263, SEQ ID NO:264, SEQ ID NO:265, SEQ ID NO:266, SEQ ID NO:267, SEQ ID NO:268, SEQ ID NO:269, SEQ ID NO:270, SEQ ID NO:271, SEQ ID NO:272, SEQ ID NO:273, SEQ ID NO:274, SEQ ID NO:275, SEQ ID NO:276, SEQ ID NO:277, SEQ ID NO:278, SEQ ID NO:279, SEQ ID NO:280, SEQ ID NO:281, SEQ ID NO:282, SEQ ID NO:283, SEQ ID NO:284, SEQ ID NO:285, SEQ ID NO:286, SEQ ID NO:287, SEQ ID NO:288, SEQ ID NO:289, SEQ ID NO:290, SEQ ID NO:291, SEQ ID NO:292, SEQ ID NO:293, SEQ ID NO:294, SEQ ID NO:295, SEQ ID NO:296, SEQ ID NO:297, SEQ ID NO:298, SEQ ID NO:299, SEQ ID NO:300, SEQ ID NO:301, SEQ ID NO:302, SEQ ID NO:303, SEQ ID NO:304, SEQ ID NO:305, SEQ ID NO:306, SEQ ID NO:307, SEQ ID NO:308, SEQ ID NO:309, SEQ ID NO:310, SEQ ID NO:311, SEQ ID NO:312, SEQ ID NO:313, SEQ ID NO:314, SEQ ID NO:315, SEQ ID NO:316, SEQ ID NO:317, SEQ ID NO:318, SEQ ID NO:319, SEQ ID NO:320, SEQ ID NO:321, SEQ ID NO:322, SEQ ID NO:323, SEQ ID NO:324, SEQ ID NO:325, SEQ ID NO:326, SEQ ID NO:327, SEQ ID NO:328, SEQ ID NO:329, SEQ ID NO:330, SEQ ID NO:331, SEQ ID NO:332, SEQ ID NO:333, SEQ ID NO:334, SEQ ID NO:335, SEQ ID NO:336, SEQ ID NO:337, SEQ ID NO:338, SEQ ID NO:339, SEQ ID NO:340, SEQ ID NO:341, SEQ ID NO:342, SEQ ID NO:343, SEQ ID NO:344, SEQ ID NO:345, SEQ ID NO:346, SEQ ID NO:347, SEQ ID NO:348, SEQ ID NO:349, SEQ ID NO:350, SEQ ID NO:351, SEQ ID NO:352, SEQ ID NO:353, SEQ ID NO:354, SEQ ID NO:355, SEQ ID NO:356, SEQ ID NO:357, SEQ ID NO:358, SEQ ID NO:359, SEQ ID NO:360, SEQ ID NO:361, SEQ ID NO:362, SEQ ID NO:363, SEQ ID NO:364, SEQ ID NO:365, SEQ ID NO:366, SEQ ID NO:367, SEQ ID NO:368, SEQ ID NO:369, SEQ ID NO:370, SEQ ID NO:371, SEQ ID NO:372, SEQ ID NO:373, SEQ ID NO:374, SEQ ID NO:375, SEQ ID NO:376, SEQ ID NO:377, SEQ ID NO:378, SEQ ID NO:379, SEQ ID NO:380, SEQ ID NO:381, SEQ ID NO:382, SEQ ID NO:383, SEQ ID NO:384, SEQ ID NO:385, SEQ ID NO:386, SEQ ID NO:387, SEQ ID NO:388, SEQ ID NO:389, SEQ ID NO:390, SEQ ID NO:391, SEQ ID NO:392, SEQ ID NO:393, SEQ ID NO:394, SEQ ID NO:395, SEQ ID NO:396, SEQ ID NO:397, SEQ ID NO:398, SEQ ID NO:399, SEQ ID NO:400, SEQ ID NO:401, SEQ ID NO:402, SEQ ID NO:403, SEQ ID NO:404, SEQ ID NO:405, SEQ ID NO:406, SEQ ID NO:407, SEQ ID NO:408, SEQ ID NO:409, SEQ ID NO:410, SEQ ID NO:411, SEQ ID NO:412, SEQ ID NO:413, SEQ ID NO:414, SEQ ID NO:415, SEQ ID NO:416, SEQ ID NO:417, SEQ ID NO:418, SEQ ID NO:419, SEQ ID NO:420, SEQ ID NO:421, SEQ ID NO:422, SEQ ID NO:423, SEQ ID NO:424, SEQ ID NO:425, SEQ ID NO:426, SEQ ID NO:427, SEQ ID NO:428, SEQ ID NO:429, SEQ ID NO:430, SEQ ID NO:431, SEQ ID NO:432, SEQ ID NO:433, SEQ ID NO:434, SEQ ID NO:435, SEQ ID NO:436, SEQ ID NO:437, SEQ ID NO:438, SEQ ID NO:439, SEQ ID NO:440, SEQ ID NO:441, SEQ ID NO:442, SEQ ID NO:443, SEQ ID NO:444, SEQ ID NO:445, SEQ ID NO:446, SEQ ID NO:447, SEQ ID NO:448, SEQ ID NO:449, SEQ ID NO:450, SEQ ID NO:451, SEQ ID NO:452, SEQ ID NO:453, SEQ ID NO:454, SEQ ID NO:455, SEQ ID NO:456, SEQ ID NO:457, SEQ ID NO:458, SEQ ID NO:459, SEQ ID NO:460, SEQ ID NO:461, SEQ ID NO:462, SEQ ID NO:463, SEQ ID NO:464, SEQ ID NO:465, SEQ ID NO:466, SEQ ID NO:467, SEQ ID NO:468, SEQ ID NO:469, SEQ ID NO:470, SEQ ID NO:471, SEQ ID NO:472, SEQ ID NO:473, SEQ ID NO:474, SEQ ID NO:475, SEQ ID NO:476, SEQ ID NO:477, SEQ ID NO:478, SEQ ID NO:479, SEQ ID NO:480, SEQ ID NO:481, SEQ ID NO:482, SEQ ID NO:483, SEQ ID NO:484, SEQ ID NO:485, SEQ ID NO:486, SEQ ID NO:487, SEQ ID NO:488, SEQ ID NO:489, SEQ ID NO:490, SEQ ID NO:491, SEQ ID NO:492, SEQ ID NO:493, SEQ ID NO:494, SEQ ID NO:495, SEQ ID NO:496, SEQ ID NO:497, SEQ ID NO:498, SEQ ID NO:499, SEQ ID NO:500, SEQ ID NO:501, SEQ ID NO:502, SEQ ID NO:503, SEQ ID NO:504, SEQ ID NO:505, SEQ ID NO:506, SEQ ID NO:507, SEQ ID NO:508, SEQ ID NO:509, SEQ ID NO:510, SEQ ID NO:511, SEQ ID NO:512, SEQ ID NO:513, SEQ ID NO:514, SEQ ID NO:515, SEQ ID NO:516, SEQ ID NO:517, SEQ ID NO:518, SEQ ID NO:519, SEQ ID NO:520, SEQ ID NO:521, SEQ ID NO:522, SEQ ID NO:523, SEQ ID NO:524, SEQ ID NO:525, SEQ ID NO:526, SEQ ID NO:527, SEQ ID NO:528, SEQ ID NO:529, SEQ ID NO:530, SEQ ID NO:531, SEQ ID NO:532, SEQ ID NO:533, SEQ ID NO:534, SEQ ID NO:535, SEQ ID NO:536, SEQ ID NO:537, SEQ ID NO:538, SEQ ID NO:539, SEQ ID NO:540, SEQ ID NO:541, SEQ ID NO:542, SEQ ID NO:543, SEQ ID NO:544, SEQ ID NO:545, SEQ ID NO:546, SEQ ID NO:547, SEQ ID NO:548, SEQ ID NO:549, SEQ ID NO:550, SEQ ID NO:551, SEQ ID NO:552, SEQ ID NO:553, SEQ ID NO:554, SEQ ID NO:555, SEQ ID NO:556, SEQ ID NO:557, SEQ ID NO:558, SEQ ID NO:559, SEQ ID NO:560, SEQ ID NO:561, SEQ ID NO:562, SEQ ID NO:563, SEQ ID NO:564, SEQ ID NO:565, SEQ ID NO:566, SEQ ID NO:567, SEQ ID NO:568, SEQ ID NO:569, SEQ ID NO:570, SEQ ID NO:571, SEQ ID NO:572, SEQ ID NO:573, SEQ ID NO:574, SEQ ID NO:575, SEQ ID NO:576, SEQ ID NO:577, SEQ ID NO:578, SEQ ID NO:579, SEQ ID NO:580, SEQ ID NO:581, SEQ ID NO:582, SEQ ID NO:583, SEQ ID NO:584, SEQ ID NO:585, SEQ ID NO:586, SEQ ID NO:587, SEQ ID NO:588, SEQ ID NO:589, SEQ ID NO:590, SEQ ID NO:591, SEQ ID NO:592, SEQ ID NO:593, SEQ ID NO:594, SEQ ID NO:595, SEQ ID NO:596, SEQ ID NO:597, SEQ ID NO:598, SEQ ID NO:599, SEQ ID NO:600, SEQ ID NO:601, SEQ ID NO:602, SEQ ID NO:603, SEQ ID NO:604, SEQ ID NO:605, SEQ ID NO:606, SEQ ID NO:607, SEQ ID NO:608, SEQ ID NO:609, SEQ ID NO:610, SEQ ID NO:611, SEQ ID NO:612, SEQ ID NO:613, SEQ ID NO:614, SEQ ID NO:615, SEQ ID NO:616, SEQ ID NO:617, SEQ ID NO:618, SEQ ID NO:619, SEQ ID NO:620, SEQ ID NO:621, SEQ ID NO:622, SEQ ID NO:623, SEQ ID NO:624, SEQ ID NO:625, SEQ ID NO:626, SEQ ID NO:627, SEQ ID NO:628, SEQ ID NO:629, SEQ ID NO:630, SEQ ID NO:631, SEQ ID NO:632, SEQ ID NO:633, SEQ ID NO:634, SEQ ID NO:635, SEQ ID NO:636, SEQ ID NO:637, SEQ ID NO:638, SEQ ID NO:639, SEQ ID NO:640, SEQ ID NO:641, SEQ ID NO:642, SEQ ID NO:643, SEQ ID NO:644, SEQ ID NO:645, SEQ ID NO:646, SEQ ID NO:647, SEQ ID NO:648, SEQ ID NO:649, SEQ ID NO:650, SEQ ID NO:651, SEQ ID NO:652, SEQ ID NO:653, SEQ ID NO:654, SEQ ID NO:655, SEQ ID NO:656, SEQ ID NO:657, SEQ ID NO:658, SEQ ID NO:659, SEQ ID NO:660, SEQ ID NO:661, SEQ ID NO:662, SEQ ID NO:663, SEQ ID NO:664, SEQ ID NO:665, SEQ ID NO:666, SEQ ID NO:667, SEQ ID NO:668, SEQ ID NO:669, SEQ ID NO:670, SEQ ID NO:671, SEQ ID NO:672, SEQ ID NO:673, SEQ ID NO:674, SEQ ID NO:675, SEQ ID NO:676, SEQ ID NO:677, SEQ ID NO:678, SEQ ID NO:679, SEQ ID NO:680, SEQ ID NO:681, SEQ ID NO:682, SEQ ID NO:683, SEQ ID NO:684, SEQ ID NO:685, SEQ ID NO:686, SEQ ID NO:687, SEQ ID NO:688, SEQ ID NO:689, SEQ ID NO:690, SEQ ID NO:691, SEQ ID NO:692, SEQ ID NO:693, SEQ ID NO:694, SEQ ID NO:695, SEQ ID NO:696, SEQ ID NO:697, SEQ ID NO:698, SEQ ID NO:699, SEQ ID NO:700, SEQ ID NO:701, SEQ ID NO:702, SEQ ID NO:703, SEQ ID NO:704, SEQ ID NO:705, SEQ ID NO:706, SEQ ID NO:707, SEQ ID NO:708, SEQ ID NO:709, SEQ ID NO:710, SEQ ID NO:711, SEQ ID NO:712, SEQ ID NO:713, SEQ ID NO:714, SEQ ID NO:715, SEQ ID NO:716, SEQ ID NO:717, SEQ ID NO:718, SEQ ID NO:719, SEQ ID NO:720, SEQ ID NO:721, SEQ ID NO:722, SEQ ID NO:723, SEQ ID NO:724, SEQ ID NO:725, SEQ ID NO:726, SEQ ID NO:727, SEQ ID NO:728, SEQ ID NO:729, SEQ ID NO:730, SEQ ID NO:731, SEQ ID NO:732, SEQ ID NO:733, SEQ ID NO:734, SEQ ID NO:735, SEQ ID NO:736, SEQ ID NO:737, SEQ ID NO:738, SEQ ID NO:739, SEQ ID NO:740, SEQ ID NO:741, SEQ ID NO:742, SEQ ID NO:743, SEQ ID NO:744, SEQ ID NO:745, SEQ ID NO:746, SEQ ID NO:747, SEQ ID NO:748, SEQ ID NO:749, SEQ ID NO:750, SEQ ID NO:751, SEQ ID NO:752, SEQ ID NO:753, SEQ ID NO:754, SEQ ID NO:755, SEQ ID NO:756, SEQ ID NO:757, SEQ ID NO:758, SEQ ID NO:759, SEQ ID NO:760, SEQ ID NO:761, SEQ ID NO:762, SEQ ID NO:763, SEQ ID NO:764, SEQ ID NO:765, SEQ ID NO:766, SEQ ID NO:767, SEQ ID NO:768, SEQ ID NO:769, SEQ ID NO:770, SEQ ID NO:771, SEQ ID NO:772, SEQ ID NO:773, SEQ ID NO:774, SEQ ID NO:775, SEQ ID NO:776, SEQ ID NO:777, SEQ ID NO:778, SEQ ID NO:779, SEQ ID NO:780, SEQ ID NO:781, SEQ ID NO:782, SEQ ID NO:783, SEQ ID NO:784, SEQ ID NO:785, SEQ ID NO:786, SEQ ID NO:787, SEQ ID NO:788, SEQ ID NO:789, SEQ ID NO:790, SEQ ID NO:791, SEQ ID NO:792, SEQ ID NO:793, SEQ ID NO:794, SEQ ID NO:795, SEQ ID NO:796, SEQ ID NO:797, SEQ ID NO:798, SEQ ID NO:799, SEQ ID NO:800, SEQ ID NO:801, SEQ ID NO:802, SEQ ID NO:803, SEQ ID NO:804, SEQ ID NO:805, SEQ ID NO:806, SEQ ID NO:807, SEQ ID NO:808, SEQ ID NO:809, SEQ ID NO:810, SEQ ID NO:811, SEQ ID NO:812, SEQ ID NO:813, SEQ ID NO:814, SEQ ID NO:815, SEQ ID NO:816, SEQ ID NO:817, SEQ ID NO:818, SEQ ID NO:819, SEQ ID NO:820, SEQ ID NO:821, SEQ ID NO:822, SEQ ID NO:823, SEQ ID NO:824, SEQ ID NO:825, SEQ ID NO:826, SEQ ID NO:827, SEQ ID NO:828, SEQ ID NO:829, SEQ ID NO:830, SEQ ID NO:831, SEQ ID NO:832, SEQ ID NO:833, SEQ ID NO:834, SEQ ID NO:835, SEQ ID NO:836, SEQ ID NO:837, SEQ ID NO:838, SEQ ID NO:839, SEQ ID NO:840, SEQ ID NO:841, SEQ ID NO:842, SEQ ID NO:843, SEQ ID NO:844, SEQ ID NO:845, SEQ ID NO:846, SEQ ID NO:847, SEQ ID NO:848, SEQ ID NO:849, SEQ ID NO:850, SEQ ID NO:851, SEQ ID NO:852, SEQ ID NO:853, SEQ ID NO:854, SEQ ID NO:855, SEQ ID NO:856, SEQ ID NO:857, SEQ ID NO:858, SEQ ID NO:859, SEQ ID NO:860, SEQ ID NO:861, SEQ ID NO:862, SEQ ID NO:863, SEQ ID NO:864, SEQ ID NO:865, SEQ ID NO:866, SEQ ID NO:867, SEQ ID NO:868, SEQ ID NO:869, SEQ ID NO:870, SEQ ID NO:871, SEQ ID NO:872, SEQ ID NO:873, SEQ ID NO:874, SEQ ID NO:875, SEQ ID NO:876, SEQ ID NO:877, SEQ ID NO:878, SEQ ID NO:879, SEQ ID NO:880, SEQ ID NO:881, SEQ ID NO:882, SEQ ID NO:883, SEQ ID NO:884, SEQ ID NO:885, SEQ ID NO:886, SEQ ID NO:887, SEQ ID NO:888, SEQ ID NO:889, SEQ ID NO:890, SEQ ID NO:891, SEQ ID NO:892, SEQ ID NO:893, SEQ ID NO:894, SEQ ID NO:895, SEQ ID NO:896, SEQ ID NO:897, SEQ ID NO:898, SEQ ID NO:899, SEQ ID NO:900, SEQ ID NO:901, SEQ ID NO:902, SEQ ID NO:903, SEQ ID NO:904, SEQ ID NO:905, SEQ ID NO:906, SEQ ID NO:907, SEQ ID NO:908, SEQ ID NO:909, SEQ ID NO:910, SEQ ID NO:911, SEQ ID NO:912, SEQ ID NO:913, SEQ ID NO:914, SEQ ID NO:915, SEQ ID NO:916, SEQ ID NO:917, SEQ ID NO:918, SEQ ID NO:919, SEQ ID NO:920, SEQ ID NO:921, SEQ ID NO:922, SEQ ID NO:923, SEQ ID NO:924, SEQ ID NO:925, SEQ ID NO:926, SEQ ID NO:927, SEQ ID NO:928, SEQ ID NO:929, SEQ ID NO:930, SEQ ID NO:931, SEQ ID NO:932, SEQ ID NO:933, SEQ ID NO:934, SEQ ID NO:935, SEQ ID NO:936, SEQ ID NO:937, SEQ ID NO:938, SEQ ID NO:939, SEQ ID NO:940, SEQ ID NO:941, SEQ ID NO:942, SEQ ID NO:943, SEQ ID NO:944, SEQ ID NO:945, SEQ ID NO:946, SEQ ID NO:947, SEQ ID NO:948, SEQ ID NO:949, SEQ ID NO:950, SEQ ID NO:951, SEQ ID NO:952, SEQ ID NO:953, SEQ ID NO:954, SEQ ID NO:955, SEQ ID NO:956, SEQ ID NO:957, SEQ ID NO:958, SEQ ID NO:959, SEQ ID NO:960, SEQ ID NO:961, SEQ ID NO:962, SEQ ID NO:963, SEQ ID NO:964, SEQ ID NO:965, SEQ ID NO:966, SEQ ID NO:967, SEQ ID NO:968, SEQ ID NO:969, SEQ ID NO:970, SEQ ID NO:971, SEQ ID NO:972, SEQ ID NO:973, SEQ ID NO:974, SEQ ID NO:975, SEQ ID NO:976, SEQ ID NO:977, SEQ ID NO:978, SEQ ID NO:979, SEQ ID NO:980, SEQ ID NO:981, SEQ ID NO:982, SEQ ID NO:983, SEQ ID NO:984, SEQ ID NO:985, SEQ ID NO:986, SEQ ID NO:987, SEQ ID NO:988, SEQ ID NO:989, SEQ ID NO:990, SEQ ID NO:991, SEQ ID NO:992, SEQ ID NO:993, SEQ ID NO:994, SEQ ID NO:995, SEQ ID NO:996, SEQ ID NO:997, SEQ ID NO:998, SEQ ID NO:999, SEQ ID NO:1000, SEQ ID NO:1001, SEQ ID NO:1002, SEQ ID NO:1003, SEQ ID NO:1004, SEQ ID NO:1005, SEQ ID NO:1006, SEQ ID NO:1007, SEQ ID NO:1008, SEQ ID NO:1009, SEQ ID NO:1010, SEQ ID NO:1011, SEQ ID NO:1012, SEQ ID NO:1013, SEQ ID NO:1014, SEQ ID NO:1015, SEQ ID NO:1016, SEQ ID NO:1017, SEQ ID NO:1018, SEQ ID NO:1019, SEQ ID NO:1020, SEQ ID NO:1021, SEQ ID NO:1022, SEQ ID NO:1023, SEQ ID NO:1024, SEQ ID NO:1025, SEQ ID NO:1026, SEQ ID NO:1027, SEQ ID NO:1028, SEQ ID NO:1029, SEQ ID NO:1030, SEQ ID NO:1031, SEQ ID NO:1032, SEQ ID NO:1033, SEQ ID NO:1034, SEQ ID NO:1035, SEQ ID NO:1036, SEQ ID NO:1037, SEQ ID NO:1038, SEQ ID NO:1039, SEQ ID NO:1040, SEQ ID NO:1041, SEQ ID NO:1042, SEQ ID NO:1043, SEQ ID NO:1044, SEQ ID NO:1045, SEQ ID NO:1046, SEQ ID NO:1047, SEQ ID NO:1048, SEQ ID NO:1049, SEQ ID NO:1050, SEQ ID NO:1051, SEQ ID NO:1052, SEQ ID NO:1053, SEQ ID NO:1054, SEQ ID NO:1055, SEQ ID NO:1056, SEQ ID NO:1057, SEQ ID NO:1058, SEQ ID NO:1059, SEQ ID NO:1060, SEQ ID NO:1061, SEQ ID NO:1062, SEQ ID NO:1063, SEQ ID NO:1064, SEQ ID NO:1065, SEQ ID NO:1066, SEQ ID NO:1067, SEQ ID NO:1068, SEQ ID NO:1069, SEQ ID NO:1070, SEQ ID NO:1071, SEQ ID NO:1072, SEQ ID NO:1073, SEQ ID NO:1074, SEQ ID NO:1075, SEQ ID NO:1076, SEQ ID NO:1077, SEQ ID NO:1078, SEQ ID NO:1079, SEQ ID NO:1080, SEQ ID NO:1081, SEQ ID NO:1082, SEQ ID NO:1083, SEQ ID NO:1084, SEQ ID NO:1085, SEQ ID NO:1086, SEQ ID NO:1087, SEQ ID NO:1088, SEQ ID NO:1089, SEQ ID NO:1090, SEQ ID NO:1091, SEQ ID NO:1092, SEQ ID NO:1093, SEQ ID NO:1094, SEQ ID NO:1095, SEQ ID NO:1096, SEQ ID NO:1097, SEQ ID NO:1098, SEQ ID NO:1099, SEQ ID NO:1100, SEQ ID NO:1101, SEQ ID NO:1102, SEQ ID NO:1103, SEQ ID NO:1104, SEQ ID NO:1105, SEQ ID NO:1106, SEQ ID NO:1107, SEQ ID NO:1108, SEQ ID NO:1109, SEQ ID NO:1110, SEQ ID NO:1111, SEQ ID NO:1112, SEQ ID NO:1113, SEQ ID NO:1114, SEQ ID NO:1115, SEQ ID NO:1116, SEQ ID NO:1117, SEQ ID NO:1118, SEQ ID NO:1119, SEQ ID NO:1120, SEQ ID NO:1121, SEQ ID NO:1122, SEQ ID NO:1123, SEQ ID NO:1124, SEQ ID NO:1125, SEQ ID NO:1126, SEQ ID NO:1127, SEQ ID NO:1128, SEQ ID NO:1129, SEQ ID NO:1130, SEQ ID NO:1131, SEQ ID NO:1132, SEQ ID NO:1133, SEQ ID NO:1134, SEQ ID NO:1135, SEQ ID NO:1136, SEQ ID NO:1137, SEQ ID NO:1138, SEQ ID NO:1139, SEQ ID NO:1140, SEQ ID NO:1141, SEQ ID NO:1142, SEQ ID NO:1143, SEQ ID NO:1144, SEQ ID NO:1145, SEQ ID NO:1146, SEQ ID NO:1147, SEQ ID NO:1148, SEQ ID NO:1149, SEQ ID NO:1150, SEQ ID NO:1151, SEQ ID NO:1152, SEQ ID NO:1153, SEQ ID NO:1154, SEQ ID NO:1155, SEQ ID NO:1156, SEQ ID NO:1157, SEQ ID NO:1158, SEQ ID NO:1159, SEQ ID NO:1160, SEQ ID NO:1161, SEQ ID NO:1162, SEQ ID NO:1163, SEQ ID NO:1164, SEQ ID NO:1165, SEQ ID NO:1166, SEQ ID NO:1167, SEQ ID NO:1168, SEQ ID NO:1169, SEQ ID NO:1170, SEQ ID NO:1171, SEQ ID NO:1172, SEQ ID NO:1173, SEQ ID NO:1174, SEQ ID NO:1175, SEQ ID NO:1176, SEQ ID NO:1177, SEQ ID NO:1178, SEQ ID NO:1179, SEQ ID NO:1180, SEQ ID NO:1181, SEQ ID NO:1182, SEQ ID NO:1183, SEQ ID NO:1184, SEQ ID NO:1185, SEQ ID NO:1186, SEQ ID NO:1187, SEQ ID NO:1188, SEQ ID NO:1189, SEQ ID NO:1190, SEQ ID NO:1191, SEQ ID NO:1192, SEQ ID NO:1193, SEQ ID NO:1194, SEQ ID NO:1195, SEQ ID NO:1196, SEQ ID NO:1197, SEQ ID NO:1198, SEQ ID NO:1199, SEQ ID NO:1200, SEQ ID NO:1201, SEQ ID NO:1202, SEQ ID NO:1203, SEQ ID NO:1204, SEQ ID NO:1205, SEQ ID NO:1206, SEQ ID NO:1207, SEQ ID NO:1208, SEQ ID NO:1209, SEQ ID NO:1210, SEQ ID NO:1211, SEQ ID NO:1212, SEQ ID NO:1213, SEQ ID NO:1214, SEQ ID NO:1215, SEQ ID NO:1216, SEQ ID NO:1217, SEQ ID NO:1218, SEQ ID NO:1219, SEQ ID NO:1220, SEQ ID NO:1221, SEQ ID NO:1222, SEQ ID NO:1223, SEQ ID NO:1224, SEQ ID NO:1225, SEQ ID NO:1226, SEQ ID NO:1227, SEQ ID NO:1228, SEQ ID NO:1229, SEQ ID NO:1230, SEQ ID NO:1231, SEQ ID NO:1232, SEQ ID NO:1233, SEQ ID NO:1234, SEQ ID NO:1235, SEQ ID NO:1236, SEQ ID NO:1237, SEQ ID NO:1238, SEQ ID NO:1239, SEQ ID NO:1240, SEQ ID NO:1241, SEQ ID NO:1242, SEQ ID NO:1243, SEQ ID NO:1244, SEQ ID NO:1245, SEQ ID NO:1246, SEQ ID NO:1247, SEQ ID NO:1248, SEQ ID NO:1249, SEQ ID NO:1250, SEQ ID NO:1251, SEQ ID NO:1252, SEQ ID NO:1253, SEQ ID NO:1254, SEQ ID NO:1255, SEQ ID NO:1256, SEQ ID NO:1257, SEQ ID NO:1258, SEQ ID NO:1259, SEQ ID NO:1260, SEQ ID NO:1261, SEQ ID NO:1262, SEQ ID NO:1263, SEQ ID NO:1264, SEQ ID NO:1265, SEQ ID NO:1266, SEQ ID NO:1267, SEQ ID NO:1268, SEQ ID NO:1269, SEQ ID NO:1270, SEQ ID NO:1271, SEQ ID NO:1272, SEQ ID NO:1273, SEQ ID NO:1274, SEQ ID NO:1275, SEQ ID NO:1276, SEQ ID NO:1277, SEQ ID NO:1278, SEQ ID NO:1279, SEQ ID NO:1280, SEQ ID NO:1281, SEQ ID NO:1282, SEQ ID NO:1283, SEQ ID NO:1284, SEQ ID NO:1285, SEQ ID NO:1286, SEQ ID NO:1287, SEQ ID NO:1288, SEQ ID NO:1289, SEQ ID NO:1290, SEQ ID NO:1291, SEQ ID NO:1292, SEQ ID NO:1293, SEQ ID NO:1294, SEQ ID NO:1295, SEQ ID NO:1296, SEQ ID NO:1297, SEQ ID NO:1298, SEQ ID NO:1299, SEQ ID NO:1300, SEQ ID NO:1301, SEQ ID NO:1302, SEQ ID NO:1303, SEQ ID NO:1304, SEQ ID NO:1305, SEQ ID NO:1306, SEQ ID NO:1307, SEQ ID NO:1308, SEQ ID NO:1309, SEQ ID NO:1310, SEQ ID NO:1311, SEQ ID NO:1312, SEQ ID NO:1313, SEQ ID NO:1314, SEQ ID NO:1315, SEQ ID NO:1316, SEQ ID NO:1317, SEQ ID NO:1318, SEQ ID NO:1319, SEQ ID NO:1320, SEQ ID NO:1321, SEQ ID NO:1322, SEQ ID NO:1323, SEQ ID NO:1324, SEQ ID NO:1325, SEQ ID NO:1326, SEQ ID NO:1327, SEQ ID NO:1328, SEQ ID NO:1329, SEQ ID NO:1330, SEQ ID NO:1331, SEQ ID NO:1332, SEQ ID NO:1333, SEQ ID NO:1334, SEQ ID NO:1335, SEQ ID NO:1336, SEQ ID NO:1337, SEQ ID NO:1338, SEQ ID NO:1339, SEQ ID NO:1340, SEQ ID NO:1341, SEQ ID NO:1342, SEQ ID NO:1343, SEQ ID NO:1344, SEQ ID NO:1345, SEQ ID NO:1346, SEQ ID NO:1347, SEQ ID NO:1348, SEQ ID NO:1349, SEQ ID NO:1350, SEQ ID NO:1351, SEQ ID NO:1352, SEQ ID NO:1353, SEQ ID NO:1354, SEQ ID NO:1355, SEQ ID NO:1356, SEQ ID NO:1357, SEQ ID NO:1358, SEQ ID NO:1359, SEQ ID NO:1360, SEQ ID NO:1361, SEQ ID NO:1362, SEQ ID NO:1363, SEQ ID NO:1364, SEQ ID NO:1365, SEQ ID NO:1366, SEQ ID NO:1367, SEQ ID NO:1368, SEQ ID NO:1369, SEQ ID NO:1370, SEQ ID NO:1371, SEQ ID NO:1372, SEQ ID NO:1373, SEQ ID NO:1374, SEQ ID NO:1375, SEQ ID NO:1376, SEQ ID NO:1377, SEQ ID NO:1378, SEQ ID NO:1379, SEQ ID NO:1380, SEQ ID NO:1381, SEQ ID NO:1382, SEQ ID NO:1383, SEQ ID NO:1384, SEQ ID NO:1385, SEQ ID NO:1386, SEQ ID NO:1387, SEQ ID NO:1388, SEQ ID NO:1389, SEQ ID NO:1390, SEQ ID NO:1391, SEQ ID NO:1392, SEQ ID NO:1393, SEQ ID NO:1394, SEQ ID NO:1395, SEQ ID NO:1396, SEQ ID NO:1397, SEQ ID NO:1398, SEQ ID NO:1399, SEQ ID NO:1400, SEQ ID NO:1401, SEQ ID NO:1402, SEQ ID NO:1403, SEQ ID NO:1404, SEQ ID NO:1405, SEQ ID NO:1406, SEQ ID NO:1407, SEQ ID NO:1408, SEQ ID NO:1409, SEQ ID NO:1410, SEQ ID NO:1411, SEQ ID NO:1412, SEQ ID NO:1413, SEQ ID NO:1414, SEQ ID NO:1415, SEQ ID NO:1416, SEQ ID NO:1417, SEQ ID NO:1418, SEQ ID NO:1419, SEQ ID NO:1420, SEQ ID NO:1421, SEQ ID NO:1422, SEQ ID NO:1423, SEQ ID NO:1424, SEQ ID NO:1425, SEQ ID NO:1426, SEQ ID NO:1427, SEQ ID NO:1428, SEQ ID NO:1429, SEQ ID NO:1430, SEQ ID NO:1431, SEQ ID NO:1432, SEQ ID NO:1433, SEQ ID NO:1434, SEQ ID NO:1435, SEQ ID NO:1436, SEQ ID NO:1437, SEQ ID NO:1438, SEQ ID NO:1439, SEQ ID NO:1440, SEQ ID NO:1441, SEQ ID NO:1442, SEQ ID NO:1443, SEQ ID NO:1444, SEQ ID NO:1445, SEQ ID NO:1446, SEQ ID NO:1447, SEQ ID NO:1448, SEQ ID NO:1449, SEQ ID NO:1450, SEQ ID NO:1451, SEQ ID NO:1452, SEQ ID NO:1453, SEQ ID NO:1454, SEQ ID NO:1455, SEQ ID NO:1456, SEQ ID NO:1457, SEQ ID NO:1458, SEQ ID NO:1459, SEQ ID NO:1460, SEQ ID NO:1461, SEQ ID NO:1462, SEQ ID NO:1463, SEQ ID NO:1464, SEQ ID NO:1465, SEQ ID NO:1466, SEQ ID NO:1467, SEQ ID NO:1468, SEQ ID NO:1469, SEQ ID NO:1470, SEQ ID NO:1471, SEQ ID NO:1472, SEQ ID NO:1473, SEQ ID NO:1474, SEQ ID NO:1475, SEQ ID NO:1476, SEQ ID NO:1477, SEQ ID NO:1478, SEQ ID NO:1479, SEQ ID NO:1480, SEQ ID NO:1481, SEQ ID NO:1482, SEQ ID NO:1483, SEQ ID NO:1484, SEQ ID NO:1485, SEQ ID NO:1486, SEQ ID NO:1487, SEQ ID NO:1488, SEQ ID NO:1489, SEQ ID NO:1490, SEQ ID NO:1491, SEQ ID NO:1492, SEQ ID NO:1493, SEQ ID NO:1494, SEQ ID NO:1495, SEQ ID NO:1496, SEQ ID NO:1497, SEQ ID NO:1498, SEQ ID NO:1499, SEQ ID NO:1500, SEQ ID NO:1501, SEQ ID NO:1502, SEQ ID NO:1503, SEQ ID NO:1504, SEQ ID NO:1505, SEQ ID NO:1506, SEQ ID NO:1507, SEQ ID NO:1508, SEQ ID NO:1509, SEQ ID NO:1510, SEQ ID NO:1511, SEQ ID NO:1512, SEQ ID NO:1513, SEQ ID NO:1514, SEQ ID NO:1515, SEQ ID NO:1516, SEQ ID NO:1517, SEQ ID NO:1518, and SEQ ID NO:1519;
or to a complement of said sequence.

5. An isolated protein encoded by an isolated polynucleotide of claim 1.

6. An isolated protein encoded by an isolated polynucleotide of claim 2.

7. An isolated protein encoded by an isolated polynucleotide of claim 3.

8. An isolated protein encoded by an isolated polynucleotide of claim 4.
